United States Patent Application Publication US 2025/0154611 A1 - sequence listing, part 2

SEQ ID NO: 67 - DNA, 306284 bp, Homo sapiens
  source 1..306284: mol_type = genomic DNA
tttgcatatggtatgaggtaagcctccaacttcttttgcatgtggatatctagttttcctagcgctgggtaaaggtggaactcctctgcaagggaggtgaggaaggaggggaacagagaaaggtgtagataatgaccagtttacttttgttgaaacctagttacttcttaagcaaagattgtttaagtggatgttttcaaagctgcttgttactgtttcaaaggtcaaatagataatgattaagttgcgcatcacttaaggtagattttgacctctcacaagttgaagagtactgaagatctaagatcatttacatccctctggaagaaaaaataacatagccttctagggcaaagaagaaaaaactcaacagttacaggatattccatggttcaaagtacacctgcctggtttgctgttctccaaaatcccatgctcagttggttggagtggcctcactcttacctgccaacctgggaggttgatgatgaacatgtctttaccttttctttggagtttgcttaccttattaatatttgctgaagtaaatggcgaagctggagaacttgagctgcagagacaaaaaagaagcatcaatctccaacagtaagtaaacacatgggtcattcctgctcagggactaggctaattcctcaccagttttcccaaatagccagataaacaaaggtgcaatttttcttgaggaaaattatgttgagaagcaaacagggaaaaacatttagactgaggtatgaaattactttcctatgcacaaattattatctgtcattttgcaaataatctgtttgcaattgccaggaggtatctctgagaaatgtgcagagaaaaaagtggcagatgagcaggggcagttgggttgagatgatcaaaaagtgaagatgtatttggcctgtagttattcagtaagaaactttgttattttggtttaaaaattgtacttgctaattactgatgcattctctcgtttgaattatataggcctcgaatggctacagagagaggaaatttggtgtttcttacggggtctgctcaaaacattgagtttagaaccggatccctgggaaaaattaaattaaatgatgaagatctcagtgagtgtttacatcaggtaatacactggaaatatattgaagtcattttgtatatccatatacggtgacttaattgaacaagtctagattaatctgtaccttgaatcttttttaattattattttttattaatacataatttgatacattcctataatgtgtaaagttcaaatcagggtaattgggatatccatcaccttaaatatttaccttttcttcatgctaagaacatatgaattgttctcttctagttattttgaaatgtacaatagattaatgttaactatagtcaccctactggtctatcaaacactaggtcttatttcttctatctaactatatattgtattcattaatcaacctgtcttcagcctccctcccccttcctagtgtaccttgaatctttagcatagagaacataattgggcatcagacatgttcttgtaaaggacgatggcctggggttaatagtgggtagagggagtatgctaaaagatagaagctcattgtgccagacaatgcaccctagtccagagaaggcacggagggtggaactgaaactcctccacaggggatgcgaggaagtaggggaccaaggatatgtggacatgtgaccagtttgcttttgccacagaacagaattggccagttattctcctgccttactgggtgttttcatttcccaataatcactgcatatttcagtcataatgttagaagtcagcattattcagagcttactgtgggccatccactgtgcttagcaccgtatggatgttatctcatttgaccttcacagctgtcctatgaggtggcctttattgtcaccctagttttacaagaggtaaagaaaccctgaagcagttaggtaacttgcccaggacagcaataaatagctgagccaggacttaaaacctaaacagtctgcttccaagccaggtttcttaataagcaccctaaactggtattataggaaaacatacaaatggaaaataccttgatctattgttactgaaaaggataagtggaattatgctgtggctattttagcccagtgtttattacgcatggtgttgttttggtttttataataataggcaagatcttagtgcttaaagtagaatactactcaagtttttaattatgttactgtaaagataaatatgatattttcactagtgctcttcatttcttcttctttttctaaaattagatccagaaaaacaaagaagatattatagagttaaaagggagtgcaattggtctgcctcaaaatatatctagtcaaatctatcagcttaattccaaggtaagtctgacatctacgtcataagaaccgatgagttctccctagttctattgtataagtaaccgttttgtaggggatataccaactttgtgtgctctttagagatttagcatgtaactactcactgtttggttaaatgacacagctgtaatggaggctgtagaagtgatggacagaaggcaggaaatgctgtgcaagcacttgttgcagaagtaggccttgggctgggagcagtggctcactgcaagtgaatggatgattaatataaaaaactgcctgtaatcccagcagtttgggaggccacagagggagggtcgcttgagcctaggagtttgagaccagcctgggccacatagtgagactccgtctctaccaaaaaaaaaaaaaaaaaaaaaaatagctgggcatggtggcatgagcctgtactcacagctacttgggaggctgaagtgggaggatggcttgagccagggaggttgagactgcagtgagctatgatcatgccactgtgctccagcccaggcaacagagtgggaccttgccagaaaaaaaaaaaaaaaaaaagaaagagagagagagagacagaaagagagagagagacagagagagagagagaaagaaagacagagtgaaagaaagagagagagagaaagaaagaaaggaagaaagaaagaaaagaagccttgctgaagttctgagagcaatcttcttattggggaagtggatgcatcactgacatttatgaacatttccatagtcactgcctacagagaagcaatcggtcaacttatcagtgggttgtactttaaaaaaaaacttaaaaaaaccccagaaatctatgtgataggagggaataggaaggaagaaaatcctgaggggagaggaatgaagaggaaaaagggaataaaaggaggaatgaacaaagtgtgtccctagcagagggcattaggacaatatgtcaaggatataacatcacatgtgcaatgcctttgaaccagctaactgaagctttttcttccctattgccagctggtggatcttgagagaaaattccaaggcttgcagcaggtaggtctcatgctactacatacccaaatctttcacagaaaacatactagaatcattaatagagctgctattcttattttgaaggtgaatggatgattaatattaaaaacttgctttttcccataatttaattctcatcccagcatgtgcttcccaggatgcagatgcagagctgagtctaagacagatgaaatgacaaggctgaggtctccgagcctgttagggcttctgaccctgagtttgcagcccacagcccacatcctttaccatcaccctttagctgtgtgtgctgtgcttggtcagctagtgatctcccaacttgctgattctcccatcagggactggggctcggaaagcaagcatcctctctgacgctaagctcggaagtctaggtgtatcacaaaatagtccgaattttcttaaaatgacatttgctggtaattaaacttgaacagtttcttacagaaaacattgtataactgtactacatgcttgtagactgatctatgtaaacttaggcttcttaccccttttgtaggaagctgaccttttaaagactttcatggaagctgtaaccttctatgcagagaaatgtacagaatctcttcatgtttaaaattttgcataaaaatctggggattccagtgtaagaatttctgcaaaaatattcttcatctgttttgctcatgcttcaagcattttcctctacttttaagtttgatctgtcccactgtgaaggacagatacaaaaaaaaggactcatgcagattgaggcaggtcccaccattctggcaaggattgctgctgcaaacctttttgtcatttgatgatcaagttcgtgtattccttttctccacttagataatacattgacccctcagctgtcatttttaagagagtagttaagcgaaagaaaatgagtaaagaatagtgctgtggaccgtgacactgcactcaagttttgtctcctggagggcttcattatattcgctcagccagtcctcctaccctcatccctcaggaggaatgttgaatgattttcaaatgtgaatgctttgtgcctttggatagggcaaatgctctctggccaccacagtccccaccactccctattgtcttcctcctgactcctgatttcattttctactaggcccctgtaggcttttaagattttagtccccagacagtgttgcttttgtctgacagaaaacctttgaatgagtttgtggttaatgttttaaagagcattctatgatggacagagccaattgttgtgctagcacaaagagaaaaatagaataatggaataaaacagggttcataaagagacccccagacgtgtggtcatctaatttatgaccaaagtggagaaggaatgtgctttgcagaaaatggtattgagtcagttggctatcctctggctttctatttcatccataaaatgaaggaaacagacgtaatttttttttatgagtcactgtatatagtatgttgtatttgtatgtgtgtgtgtatgtatgtgcatatatatagacacatatataatatatatgtatgtgtgtgcatacatatatatgaaatgtaatcaacagtttgcccctattttaactttttaaaagcagagaattaggttgggtacggtggctcacgcctgtaatcccagcactttaggaggccgaggcaggtggatcatgtgaggtcgggagtttgagatcagcctggtcaacatggtggaaccctgtctctactaaaaataggaaaattagccaggcgtagtgggacattcctgtagtcccagctactgaggaggctgaggcatgagaatcgcttcaacccaagaggtggaggttgcagtgagctgagatcataccactgcactccagcctgggtgacagaccgaggctccatctcaaaaacaaacaaacaaacaaaacaacgataccaaccaaaacccagacaattggactatgagtgaaattcataaagtggccatcattgcataatcaagtgttccctctaaagaagttttctctggctgggcgcggtggctcacacctgtaatcccagcactttaggaggctgaggcgggcggatcacgaggtcaggagatcgagaccatcctggctaacacggtgaaaccccgtctctactaaaaatacaaaaaattagctgggcgtggtggcgggcgcctgtagtcccagctacttaggaggctgaggcaggagaatggcatggacccaggaggcagcgcctgcagtgagcggagatcgcgccactgcactccagcctgggcgacagagcaagactccgtctcaaaaaaaagaaaaaaaaatcaaaaagaaaagaaaaaagaaaaaagaaaaaaaagaagttttctctgcacccaaaggcagtaaaaatcttaacaagattcaaactggtagctgacatagggtcagattccccaggttatgtagatgtagatgtagacaaaggtaggtctgtttgtgatctgggctgaaagcagtcaggtgagcaccagggtgaaagatatgtcttagctggccacatttctaacaaagggacttggagcaggagttcagtcaccttaacccatgggaggaggggcagcagcagcagatgattatatttcaaaggctcacctcgagggaccaaagataagaatcaccggtaaaataaccggaatctccattttattttctttgtgcaatagcaacatccattattatttccacacctgaaacctttactcctgtccactgaggtctctttctcaggtgagaataatacttttccaagacaaagtgagaatcttctcccctcagacttcatcccacccgtggtcaaaagcatgctgagagttaaggaataggaacaagattgataatagaaaatgctttctgttttttcacaagagaggtgatttgaagaagaacataagtaatggctttaaagtgtagaaggagacccccactgattaagagttaaatgtaatcccacgtgcacggtaacatgcgttttgttgctgctgactgcaagtcatctcattgactgtcctgtttttgtttcagactgttgacaaaaaggtttgcagcagcaatccttgccagaatggtggaacctgcctcaatctgcatgattcctttttttgtatctgtcccccacagtggaaggtgagtcatctactctttggttaagaatgatggcaggtcagcatctgtggtttccttggaatcatcaggcatatttaattctccatctaaagtttctaggattctgtggcctcccaaatcaaattgaaatataccaggtatgctaaaacccaaacagtggtgagtatgattgtataacccaccaaatactaaagccattgaaaggagaggttcacttgattggataactgcctggaagaacacaatatttctgttaacattaatttaaattgttcagcattggaaagtaccaaacaaatcttgacatacctatgcaaattttctcattttctttgtttgtttattttttctgataacgatggaaactgtctccagcatgcacataaaaaaaaaagttaagtaagtattcccagatgtagcaccactgtgaactgaggattctattatgtttagataaggattcctctcctgtgactgctgtgatcttatgaagagctcttgtgttctattaggtgaaatctgagttccagaggaagaatagccaggggttaatatcagtattattgtatttgactttatgaggacttatatactgtccacgtataaatccttaaacgtatcatgtgaatgttcgctccagatacctctgtgacctttggcacctgactttgttccttatatgatcacagggtcctctctgctcagctgatgttaacgaatgtgagatttactcaggaacacccttgagctgccagaatggaggcacatgtgttaatacaatgggaagttacaggtaacttttttttttttttttggtaaatatcagtatatttttgaaggcctaaaacatcccatagttaagagcatcctaaattaactatctgtattccaccaaaagttggtactccatgaggaaatatttagctcttgcttaacgtctacatagctatttttacttaactgaagaaaagctcatgagtcctttactctcaccccgtgaagaaatccttgctctaacatccccaaggaaccggaagaaggctcccgtgattggcacagagagtaagcatggcctggtgcaaaaggagctgaagacttaggaagagccggagcattgaaggggagccactgaatggccttaagtagaaaaggggacaccccaccacaccagtgtccccagctgtactctttccatgtattagcaagctcatagttttgggtaaagagagctttattcaatgctatgtcaaaatgtgaccataacgaggtcaaagattaaactgaggttcaatgaatgaagtaactctctctgaccacagtcatcattatcagtacagctctatcttctcttctgacttattctgtcaagtgacttgtccacagaattctcctgctcagctcaggcatcactttctgcaggaaactttcccttccctttttaagcagagtgaggcatctcagggcctctatgttcccatcatgctctagggatatccatcgtcaaagctttgctgatgccacacacattgtctttctaaaaacgaagtccaaaaaattaaggcagatcaatgccaaacttacttttgtacagttctttgaagtcaccttttaaactagacagtgtctttccttatagtttggctggtctcttttattttgtgatttttaaaagattaataaataaattctgctatagaatgaacaaatcctttcaatgctctggagtagaatctcactggattgaagagcaattatttgctctcttactggtgtctctgctatcttgttcttcaatttccacataacaatatccattctagtctttccagcaaaaatgagtgcagtaattttgttttttaaaccatcactattttttttaaattttattattattatactttaagttttagggtacatgtgcacaatgttcaggtttgttacttatgtatacatgtgccatgttggtgtgctgcatccattaactcgtcatttagcattaggtatatctcctaatgctatccctccaccctccccccaccccacaacagtccccggtgtgtgatgttccccttcctgtgtccatgtgttctcattgttcagttcccacctatgagtgagaacatgcggtgtttggttttttgtccttgtgatagtttgctgagaatgatggtttccagcttcatccatgtccctacaaaggacatgaactcatcatttttttatggctgcatagtattccatgttaaaccatcactattaatgcacacttctaaaaatgcagtcacaaaccttctctttttatttgatacttttgtttttttgatctgatctttaaaacttttactcattccaggttataaactcaaattattcaaacttctactagatatgtctatgagttcaatcattatgcaaaagtaaaattaaccacttctgacttaaatttagtgttatgttattaaagagctttttgattccaggactctgtttctcatttaaatgaagccttttttccctgcctttgttaggcttgggctggaagcaaaatgcagtctagtctctcatttccgtgaacccattatctcctgatttctgtttatgggcatttatcaaggaggattgctacatagaggcattggtggcaaatgtccaggctcctagaacttctgctttctgaccttcctgatatctaggaatgttacagagattagatttcactcctagtcttcctttatcatcactgtcttttggagtcttgtgggccaatagagcgacaagtatgggcaaactgtgatgagatccatagaccaagataaaggctgttgctgttttcagcacgttatttcttccccctgcaaaatgaaaaacaaaacaaaaacccttttactatttaccactctgcagcatgtcagaggttagagttctttatccacacacacatatgacagaatgagagctaggaggaaaggaaccatttatttgttgaaagctgcatttctaaatgacagattcaactttgtaagaacagtacgaaattctctcttgcactcttttataaaggagagcaagaatacagaagaactgatgatgtgtggatggctttggaaatgatcttgattcctagactctgcccttcatagatttgctggaggacattagagaacagagcatttaaatcagggttctttctcttgatatgggaatagtttctgaaacctcatgaattccatttcattatctacactttaagtcccgtaattcaggcatatgttagagactttttgagggaataaaagaaaatgaaaaaaggtgcatgagcataagattaaattattgctttgtggaatccacgtgtaatgaaacaagtgaacatttagatactttcttgagttctgttaattatgtgaggttaaatccttgttaatcagggtattcactgaggctagaaaaccctttgggaaatttcagcacacattagctaaaagaaaacttgagcctcagaatcatctggacctgcaaaaatgtagtcatggcatcaaagttcgctttggagtttggacctcattcagtttctttaactctttgagctcttttacttggacggaaaaaggagtctttaactggattaataatttgccattgtaaagacctctgaaaaggtgcagatactcattcatggaaagtcctgtttcatacctgtttcataggtaaacttctggtggaaattcttttttagaacaatgattatagcacaagaaacatcattttctgtttccactgattcttttggcttgaggtctagacccagagcttcagacaactaacacaattacatttcgccacttctccatgctgttactccctctttgttctgaagacgtgattcttgttgtttccctgctcactttgttttgttttgtttgtttttgtttgtttgtttttgagacagagtcttgctcttgtcacccaggctggagtgcaattgctgcaacctctgcatcctgggtacaagcaattctcctacctcagcctcccgagtagctgggattacaggcacctgacaccatacccggctaatttttgtatttttagtagagatggggtttcaccatgttggccaggctggtctcaaactcctgacctcaggtgatctgcccgcttcagccacccaaagtgctgggattacaggcgtgagccaccgtgcccagcctcccctgcttactttggatttaagacagcccttgggatctgagcttgccatgcatggatggtgtgtgttgtacatttagggctcagatctagaaggctttccagaaaaacaaaaagttgagtttctctggttttccagaaacatgatgattagtaaattttatttcacttatttccattcatatcactggtagattttacatcatgcagagtttaaacaatgaggataatctagttttagctcaggtggtagttaggtattaaacttattacctttttcactcagtcagtaaaattagtattgaaccatggactctaacacaagttaaactatgactatccaagtgtgtttaacctcttctcaattgccaaaatgcacttgcagtgttttcaaagaaaagcctagatttgttctgctggaaccaagttggcaataaaaggtcatagaaaagacacttctgctatatcagtaactaataactaaagcaggaatagtagtaagttggttttaaaaatacaatatatggcttttattttcacttagggaggtatataagtaattgttcatttttaaaggccatatcaagacaccttgaaaatatattttgcctgttaaccctgttatgtttaaaaggtacatgaggctgggcacggtggctcacacctgtaatcccagcattttgggaggccgaggtgggtggatcacctgatgtcaggagttcgagaccagccttgctaacatggtgaaaccctgtctctaccaaaaaatgcaatacttagcttacgtgctggcacgcatctgtagtcccagctacttgagaggcagaggtgggaagatcgcttgaacctgggaggcagatgttgcagtgagccgagatcgcaccactgcactccgcctgggcacaagaccctgtctcaaaacaaaacgaaacaaaacaaaacaaaaaggtgcataaaaatgcagcatcttcatataactctacttatcagaatgtaagaatataacatgcaggaacaatggtgcaggagtcgggtagacctaagtgtctatttatcttctgccaattattcattttgtggttttgggaaatgttagtctgtaaaatgggattaataatacttgtctttgaggatcataggaaggaatcctatggtttacttgagtttcttcctccctttctctatcttctcacatcatctaaacttaagtgaaagaagtatactctgtagctatttagagaacagtataggattaatgcctactcatctcccagtgataatagcaaggatgaaggaagagagagataaagagaaaggatttaactgcaggtccatgaaccagaatctcctctcaaatcttatgtcattttgcaatagttaagcacttagtgataaaataaagacaatcttcttagcacttgctacaggggaatgcctgtagactgcaatatgaccataattcacagagattaccactattatttcataagaaattgaggcagagggagttagtacattgtctgggtaaacagttaacaggaaggaccaaaatttaaacctaggcaatcttatcccaggggtttccaaacactcagatctcccagacatagaaaatagaaagctagtaacagttggtttaaagattcttcagcagggtgcggtggctcacgcctgtaatcccaggactttgggaggccgaggtgggcagatcacctgaggtcaagagttcgagaccagcctctacctctagaaaagagacttctgctaaatcagtaactaatcaattggtttcaccacatggtgaaaacccatctctactaaaaaaagaaataaaaaattagccgggtgtggtggcacgcacctgtagtcccagctactcgggaggctgaagcaggagaattgcttgaacctgggaggcggaggttgcagtgagctgagatcatgccactgcagtccagcctgggtgacagagtgagactccatctcaaaaaaaacaaaaacaaaaataaaaaagattcttaaacattgttgggaggtgttgggacaggtggcaaagtaaacttttagtaatgaagtctcctggatcaaatgctcaaatatgtgtatgaactgttttaaagttccataatcctcaagagtctaattaaattctctatacaaatattctatgtaaagatgggaggacaaagaggaaagaaaacaatatgagaaggaaagtagagagagatgcggggaatataaatgtctatgggggggatggataattcaatttctctttaattttaatcatttattgttattttcctatgactttatcttagtgagccgttccaaaggcaactttggaatgctcagaaatgtcatatattaatgaatcagcttttatgtaaatatatactgatgtcgtaaattgcatggaacatatttataccaaaaaatattcatttattggaaactcacatttatttgggcatgctgtatttttatttgctaagtctggcctcccgacttgaatgcatggatggtgctccctgcattcttattctccatttctggccacactcattgctctcctcttccttagaaactgccaaaaagctgccaccccagcaattggttctggggcccaccacaggcaagccgaatcctgtgcctggaggttggttcttgatgcctttcaaacagtcaaatgctaatttcccacaatgtcgttcatacattgtcatccatgaacattactaagctccttgtacctcactgtgtcttgttaaaatagctcttttcctttgtagaatggcatgggagggaggcctggccacgcaggcacgccctgttccttgtctctgacccctggcaccaacagtcatttcccccatgagagcttttcttgccaattctgctcaagtccggcaatcggcaacctctgggcctggccctacctctccatcagatgtgccctggcatgtggggataggcttaggcttctgggactcctctaccctcctcctcccctagctcccatgctcagatcatagaagttcccattaagctgcagagataaggctaaagcagctttaacaatgacaagggcttaaaacaacattgcttatttgattatcattggacttaaatcttctagtaacaaagcacccactgctagcttacgcatagtgtaataattaccacattttgttggaaattcaagtgtggctatgaaagaaatgccactgtattatattatataactacgctttttatggatagaagacatattgccctttgtaagataataataatgatcatagactgtgaggtgtggacactggattgcgtgtggggttatataatcctagagagcattcagagttatcagtgtagcccacgttgcctgtgcttcatggcaggtccaattggacagatgatgaatggatttgctgatctctccctttaccttcttgaactaactccattacctttggcttatacacatctgacctttgaaaatgctgtttgatgacctgataacacaagaatttatagtgctaggcttaccagataataagttgtgattcaccaacattgtatttactcaatccaccacttggagcacagcagagtgattttctcccgagactccagtcagtaaatttgcattgctggctgacgattccaagttaacatcgttgatttgtaatttgaattatttttctcattgatattaagagacaggcactggccccaaagcgcgtgccctgacattgtgctcttgtgtaaccaacagttgtcactgcccacctgagacgtacggaccccagtgtgcatccaaatatgacgactgtgaagggggttctgtggcacgctgtgtccatggcatctgtgaggatttaatgcgagagcaagctggagaggtgggtcccttccccaaatgtgcctccttgcagagagccatggttagtagctcctcctcctcctatgcccactgcatacaagcactacctggagcttacagaggtgaagtcacttcctgtctgtaagtaggacataggcgaggaggggagatgaactatgcaggaagtaggacccagagattaagatgtcattatgtaaaataggatttttttttttttttttttttgagatggagcctcactctgtcacccaggctggagtgcagtggcacgatctcagctcactgcaaccttcacctcccaggttcaagcaattctcgtgactcagcctcctgagtagctgggattacaggagcatgccaacatgcctggctaattttggtatttttagtagagacggggttttgccatgttggccaggatgatctcgaactcctgacctcaggtgatccacccgcctcagccccgcaaagcgctgcgattacaggcatgagccaccgtgcccggccgaaatgggaccatttttattatcccgtcatgactctctctgagataagaccttctcttggccttgtaagttttattttaacagtgacaaaacacaggaatataaaaggaccagtcttgttggcaacatgtggtttcaaggagtctgacttttcccggcctgggtctctggaactgctgcagactctaagagcccactccccagaacgaccctccatgccctgcgtcctgatgactttgactcctgaccctcaaggttgtccagtcttggctggcttggctcttcatgagaacttcaattctttatttttagttgtattttttctacccatgtgatggaaaataattcccgtccaatgatggggatggaagggttgaggaggtgggtaggaggaagaactttccaaagaaaaacaaacggaattgattttccaaggtctgtgcctacatgggtgtttttccctctaaaaacatagcaggctgagttgattgactttaattatattgacttacagttcttgattgttgttactctttccctggcatctttgggagaaattatagcttgcttttactctgaaataaagatgtttccctttttgcatggtctggtctaaatgcttaatcatatgggaagaaaaagagaagccagtggattggccttatggaaatgaacgttagaggataaacagttaggggcttgatgaaatgttcaaaggcttttcttgctgattttcatgattgtctttattcacgctgttgtcatcctgccagcccaagtacagctgcgtctgtgatgctgggtggatgttttcacccaacagccctgcctgcacgctggacagagacgagtgcagcttccagcccgggccttgctccacacttgtgcagtgtttcaacactcaaggctctttctactgtggggcctgtccaacaggtacattctcagggccacaagccaggctctgcatgccaggttggcgaggtgccagaaccaattttctttcactattgatgagtaagaagacaattcttaggaggtgttcaaatccagttttgtgtcctggttctgctcgacgatctcactgctatcacaattccacgtcaaaagggggaggcttgtccaaaactgtgctagagtcagactttggggcaaggttagccatagaatttgtaagttagacactgcattgcagtgaccaccaactgaccagatttgagatcaaaagagatactctagtcccacctttcatactaaccagatgtttgtacacatggggaaattatttgacctctttgcatctccaccacagtctagtagctcttgcctgggtgtgtcattagagtatcttgcggccttgacctaaacagaggtatccagctccattatgccctgcagcaactgaatctccagggatgccatatgttgagtcatggaaaacatgggctccgttagtcaaagactgcctgtgtttgaatccgagggcatcttttgttttatgagatagtcatcatatattccacacatttttttttttgtaggatgcctactatgagcaaagcactgtgctgggtgcattggtaggcaattagccagacctcaggttcatctgcgctccagggatgttcttagaaatggagccacaaagataatgtaataatagtagctggttttgttttgttttgttgttgttgttttgagacagagtctctccctgtcacccaggctggagtacagtggcatgatctcagctcactgcaacctccacctcctgggttcaagcgattctcctgcctcaccctcccgagtagctgggattacaggcacacctcaccacacccggctaatttttgtatttttagtagagatggggtttgccatgttggccaggctggtctcaaactcctggcctcaagtgatctgcctgccctggcctccaaaactgctgggattacaggcgtgagccaccacacacggcctggtttttatttttaatcaaagtgttattaaggcattgtataagcaatttttaattcttttaactacaacaaaatcaagacatggtaaaaataagtattactcacattttacaatatgagaacttgagcttaaagaggttgaataacttgcccaagatcgcatagctttacagatagccagaattgaaacccaagtttcttggcaagtttcttctcgccaagaaaccccacacacctattgccccatgtagtgatttttggtttagtggttttctgcgtgtatatatttagatcttgtaaaactggaaagaaatggaaaaaaaaaacctataaagactttttccctcttagttctcaggggcaagcacaatttgcaagcaatcacattttgaaggtaatttatcatggacaatctttaaaaactataaatcagaaaaataaattatttaaattagaagattggcaatgtttttacattcttctttttattgttggagaggaaaaagagaaacaatttttttgttttcttgtttatcaccctatttttcctgaaatatatggtagttatattttataagcagcaaagcaatatatgctgcttataaaatatcactacaaaaatatggaaaaaatagaaaaaaatacctttgatcttatcacacagaggaccatgatgaacatttgggcgtttttttcttccaactttttttcatgtacacattttgccatgcacaaatatgataattttcttaggcagagtcttagaagaggattctacttaaatcaaagaatatgaatatttttaaatctttaaaggtttttaagaattcttataattttaataatttgaattataaatctacaaccattgaatacaatgggaaccactaaagtaaaattcttaaatctcatcttcctaatgacaccattagtcatttgttctccttcctcttctactttattcttcatttgtacaagcacatatgcaagagtttaaaaaattctttccccaaattaggagtatgagcccaatcctccatatgattttaacagtttgtttttgtttttgagacaaagtctcgcccaggctggagtgcagtggtgcaatcttggctcactgcaacctccacctcccgggtttgagggattcttctgcctcagcctcccaagtagctgggactacaggcgtgaaccaccacatccagctgatttttgtatttttagtacagatggtgtttcaccattttggccaggctggtcttgaactcctggcctcaggtgatctgcccacctcggcctcccaaagtgctgggattacaggcatgagccaccttgcccagccacatttagtattttaattaatgtatatacaaaaattctttcaatgtgtgtgtatgcaaatgtaggtatacaggtgtacacatgatattaaaaagcgtttttagtatttggtcacaaagatgagtcataaggtgttcagctatgcttctattgataattgagggttttttccctattaaacagtgctgcggtagacatcctcttacctacttataccagtatactaagatgtatactaccatcttagtatactggtagttttatcacaataggctgagttttaataggtgcaactggcagtcaaagtctatgtattttaaaaattttagtgaatactgccagagctctttccaaataggttatatcaatttaatgtctagctatcagcatataagaggagcccatttgcccactttgttgtcagaatttgattttaagaattcaaaacaacttttgccaatctgataagcatatctcatttttattttatagttccttaggtggagaaggtttttatatgttttgactcttgtatttcttccttgttgacttgtctatagagctaaacttttaaatcctcttgttttcctaggctggcaaggcaatggatatatttgcgaagatatcaatgaatgtgagataaataacggcggctgttctgtggctccacccgttgagtgtgtgaatacacctgggtcttcccactgccaggcctgtccaccaggtgctgcctcggttcaatgtcaacctcctgaccccagcacagggaacacagacataggaatacggaatctagtgctccatttaaaatatgatttctggctgagtgcagttgctcatgcctgtaatcccagcactttgggaggctgaggtgggcagatcacatgaggtcgggagttcgggcctggccaacatggtgaaaccctgtctctactaaaaagacaaaaattagctgggcatggtggtgcatgcttgtaatcctagctactcgggaggctgaggcacgagaatcgcttgaacctgggaagcggagattgcagtgagctgagatcgcaccattgcactccagcctaggcaacagagtgagactctgtcttaaaaaaataaaaaataaaatattatttctgtcttaggagaggaaatagtacagaaagttttgcttatcttgtgaattcaggacacattagtacaactctatgataagaaagaaaaaacattttgaatatcagtagaaaacaacaaactttacaaactgtcaaatagctacagagataatgcagaatttgaaaagttttctgagtggatcacagacttactgttccattgccctcacgaataatttgttaatatcatgcactcctgagttgttttgcatataccaagtttactaaaccacaggcatcacagtaggcatatatcgtaattgttggtttccctccttttctggaaagaagtcttttctgctattctctaatctaaatcgaattactacccaagaagttcagggagtactaagggataaactgaaaccttgtatgtttaaataacatggaactacagtactttgggcttctataataattgacctctaagaacatcagagtcactgtaatataaaaatattaactttcttagtgtcagcactttctaagtctaccagtagttttatacatatttttttcattagaaacaacccagaacattgcttatgaaatcaggttactaattcttgttatttttcttatttatgaaatttcatttgttgatgacattttatacttatattttttgtttcgatgatagaggatccctgattggtccatttcatgatatttgaatcctagacaggctttgtcctcccatcttcttgacattgtttcttatgacctggctcttgttctcatcagggtaccagggtgacggaagagtgtgcacactcacagacatctgctcagtcagtaatggaggctgccacccagatgcctcatgctcctcaactctaggtaatgactcatctctctctttggctttgggtattgtaatatgaccttctaaaccaattcaacatcttaaacacaaaatcctctgttctcaaaattgttattttgaccttcaaacctaaaattaatccatgccataaaactacacatttggctttcttaaatatgtaataaactatgctctttaatggtctgctctgatttaggaaataaggtaattaagccagttaattaattaacgactgtattccaacaagcaggcaggagaaaaggaggaagaaggcaatgccaccttcttttgaaggactcttccatttctaggccattgcttagaactgagctttgctgcaaagggagtttgggaagtacactctatatttcaggcatcctgagtccagctgaaataaggagttcagaaagaaggaagtagaaaatagatctagggtgacaaccaacagtgtttgcaatgctgcatagaagggtttaaccctgtaatttaacaaaatatatactgctaaactttctccaagaaagattgtatcaatttatgtattcaccgacagtgtataaaaatacatatttactccatctttgacaataatagatattattattatttttcatcttggtcagttttataggcaaaattagtttttccattattttcatttatactttttgattactaataattaatactttccacattttcactgggcatctttctacttgttcatcccctttgctctctttctttcttactgattggtaaagtttctttatgtactaaggacattatctcattatctgtcttatgttttataagtgtttttcctggcatgttgtttttgttttaatcttgtagtggtagtgctattcagaagtttagaatttttacgtagtcaaaaagataaatcttttctcttactatttctcccttcacagtcatgtttaggaaggctttctttactgaactctttaaaaattgtcaagtacatgttcttttatacttctatggtttctttttttatggtaagatattttatatttttagaatgtattttttatccgtagcatcaaatagagatctggcttggtatttttgctcaaataagtggacccagttccatttcttgaataatcatgtctcttgctatttcaagataccacctttattttttattaatttgtcatatacttgcatatatagaaaagaacatatatgtgtatgtaaacacacacacacacacacacacacacatatacttgtgactaaatgcttattaaatgattatcaacataccaaagtggttaggagcatgatttctagataaagactgcttgcatttttccctgggctccaccagattttagctgcttgtcctcagtgaagacacttaatctctgtgctttagttcttcatctgtaaaatgaggataataatagcacctacctcagggtgcttcagatgattaaatgagtccttatatgtaaagtgcttgtaacaaatattattacaaaaataactgttttttaatatggaggacagtcataatgttgatgacatgaagtattaataacactttgtgtacttttaggctgcccttctttactgcaacctgtaagtttaccctgggaaacttaaaaaatttctactcagagcttcaacagtttcagagcttgcttactccatttttccctataaatatttttaaaagaagtaattaactataaaaaaatgcatttctaggcaattatttatttaaaagaaatatttgtgttttttaatattgaagtggaatcttgcaagtaatataagctgagaacataacaaaacttgtatttttgccaggcgcggtggctcacgcctgtcatcccagcactttgggaggtcgaggcaggtggatcacgaggtcaggagatagagaccatcctggccaacatggtgaaaccccgtctctactgaaaatacaaaaaattagccaggcgtggtggcgggcacctgtagtcccagctactcgggaggctgaggcaggagaatggcgtgaacccgggaggcggagcttacagtgagctgagatcgcaccactgcactccagcctgggcgacagagcgagactccgtctcaaaaaaaaaaaaaaaaaaaaagaacaacttatattgtcattcaattctactgtaaatctgtcacattgtgtaatttgttctattttttaaattattcagcagggtttttctatccatctttaacagttcttgctgatggaggaatgtagttaactgccacattgatttccttgtattatttcaaccattgtgcagtagtagaaagaacatatatttctgcaatgagatgtggctttttgctattaagtgagaaatctggaaaactctctggatattaaatttagtaaaattttgtaatgtctatgacgagtatttttaacctaacattgcgtaagaaaactgtcaagatgctggatgctctaaaactattgttagctattacctcatgtacatcataattaatcgtggatgttaattcatgttttaaatagacacgatcatttcaaattccttttgaccaagttccttcctaacctaattcgattgccattgttttaaccttgtaccttggcaatgaggagctcatcagaagtgtgggagaagttttggtgctggtattttgttgatgtccccatatatttatgttactatattatcttcaatctgtggttttattgcaaacgtcttttagagacttaagttcattctgtgatagctatttagcctgtttaaaactggcagcatgcaatctgcacatccacataactggggacatgtggcctgcctgtgtaagccacactcctgtacaggtgtgctgtaggcagcctacacacgaggggagtgcttgctctctgggctcccctcattctagctgtgtgtgtgtgtccttggccgggacaggctgtctgtgtactggcttcatctgtaaagtggggattataagagagtacctatatagggctttttttttttttttttgagatggcgttttgctctgtctcccaggctggagtgcagtggcaggatcttggctcactgcaacctccacctcctgggttgaagtgattctcctgcctcggcctcctgattagcctggactacaggccaccatgccccgctaattgttttgtatttttagtagagacagggcttaaccatcttggccaggctggtctcaaactcctgacctcaggtgatccgcctgcctcggcctcccaaagttcagggattacagattccatagggctctttattagtattattattattataattaaaaaattttttcttggaaatggagtctcactctgtcacccaggctggagtgcagtggcactatctcagctcactacaacctctgcctcctgggttcaagtgattctcctgcctcaccctcccaagtagctgggattacaggcgtgtgccaccatgcctggctaatttttgtatttttagtagagacagggtttctccacattggccaggctggtctcgaactcctgaactcaagtgatctgccctcctcagcctcccaaactgctgggattacaggcgtgagccactgtgcctggccctctattgggctcttgggaggattaaatcagtcagagtaagtccagtgcttgcaacagatagtttcatcctaagaatctccttttctgcattaactcctccatgatgaggaatgtctgtcttccccaggtgcagctcacctttgtgcacagctcaggaccatctgacatatgggctgacagcacccatgtcaacccagtacgtcaataatgtgtggaaggcatttaatggctttcttattttaagataagaaatacaaaaataaagattctaatattttctcctcataccttgttttgtctgcccgtcaaaatacacagactggatgttggtggatccttgtctagacagcagattctgagtttagatactgcatccgaacagaggaggagacctgtatttacacgtttgtttttatttctgaacaggttccttacctctctgcacgtgtctcccgggttatactggaaatggttatgggccaaatggatgtgtgcagctcagtaatatttgcctaagtcacccctgtctaaatggacaatgcatcgtgagtcctttgtttttcctgtggacagagagtacctgagaattagtttcacgcctataaaatgtaacgttataggattcaggaatgtcaagataatgagtcaagtttcagataaggaactgtcgagaactctcagatgaaagatagataatgattttagttcttaggaaaaaacattgagttaattttttgtctcagtggtttatgaagtactaaaactacgcctgcagtttgatctaaataaatctgacatacaaaacaattaccatttaaacctattaataacaagtagactactagaaaatacttacatataaacacatatatatttgtagcacctgttaaatatatcagtaggccaggcgtggtggctcatgcctgtaatcccaacactttgggagggtgaggcgggtgcatcacgagccaggagatcaagaccagcctgaccgacatggtgaaacactgtctctactgcaaaaagttagccaggtgtggtggcgcgtgcctgtaatcccagctactcaggaggctgagaccggagaatcacttgaacccgggaggcagaggttgcagtgagctgagattgcaccactgcactccagcctggccgacagagcgagactccatctcaaaaaaaaaaaaaattatatatatataattatacatatataattattacataaataataattatttttaaatatataattatatattattttatatataataattatataattattatatattatatatctccatggcactacattcctattatttgggttgattaaagtttagtgtctatccatttgttttatggtattatgtgttttttttccccttaggacactgtctctggttatttttgtaagtgtgactcaggttggacaggtgtcaactgtacagaaaacatcaatgagtgtttgagcaacccctgtttgaatggaggaacttgtgttgatggcgttgattctttcagttgtgaatgcacacgtctctggactggagctctctgtcaggttcctcagcaaggtacagtcagcatttcttatgccacggatgctcacagcatagcagcagcatcctttagtgagtccctcaacagattcctctgctgaacccactttcttgtccagttgctcagatactgagaactaagtctttccttgcagaaatggtataaaattcacaagctaaatatttataaatctcactgtaagccaagaacttttcttccaaagaataaatacattagtatttgccattttcactatgtcctttttgaatataaaacatgctaaggtattgtcttttatggttttctaaagggaagttttctgaggagcagccacttaatttccctagagtactgcattgaatcaagtcactctccctttccaggatacacagtggcttcccgttgcctgttaaatagagactgggattaattttcaatgatcttctataaccaagtctcactcaatccatctaaccttttttttcactagttccctagaaataacttcactcaagcaagttttctttcgtcaccggaccccatgtaccaccatgagtattttccactgtgttcatttatttggaatgtttctcccgataaacctcctcacacatcttccttgtttctcatccagatgtgtctgtccctcaggagcacttccctctcaacttcttccataaagtcacttttgactcttctgcccctcacttaaactcctgatttggaatcaacacatttattgagaggttgttgttatatgtttaggacaatagtagaccctatggaaaaatatgaaagtgtaaaatactgtctccacttatgaactgctcaccttgcagctgaggagacaagaccaaccccaatgggagaacagatacaagagttaaagacatgagctatgttgtgtggggtgaaattgggtgtcacagggacacagagaatgggaatcagtgaaaacataagacatggcagttcatggagcaggtgatgaggcatcagctgagctttgaacaagaggtgggatttctatggaagttgacagaaaaagggcacagaggagagggaatggcagggcttttatctccaaccttcattactcaaattttctctaagtttatcagcagcagggttacagttgcccaacctcttccttttaggaacctctgaaaagcacagttcatcttttcctttgcagtttgtggagagtccctctcaggaataaatggaagcttcagctacaggagcccggatgttggttatgttcatgatgttaactgcttctgggttatcaaaactgaaatgggaaaggtaaatgtagtaactcttgcccaaatgcatattatatttgtatatataaatatggagtatgtgtatattttattacataaaatacatgcaatgataattcaactatcatatattgagtgcttactaagtacggagtgccattattttggctagacatatacctaccttttcataaccttacattaattgtttgaaataagtcacaggggctgggtgcagtagctcttgcctgtaatcccagcactttgagaggatgaggtgggtgcatcacctgaggtcaggagttccagaccagtctggtcaatatggcgaaaccctgtctctactaaaaataaaacaaataaaaaaaaattagccaggtgtagtggcacattcctgtaatcccagctactcgggaggctgaggcaggagaattgcttgaatccaggaggcggagtttgtagtgagcagagacagtgccactgtactccagcctggccaacagagtaagactccatctcacaaaaaaaaaaaaaaaaaaaaaaaaaaagagtaacaaggccaggcctggtggctcacgcctgtgatcctagtactttatgaggctgaggcgggcacattgcctgaggtcaggaattcaagaccagcctggccaacatggtgaaaatccagctctactaaaatgacaaaaattagccaggtatggtgatgggtgcctttaatctcaggtactcgggaggctgaggcaggagaatcacttgagctcaggaggcagaggttccagtgagctgagattgcaccactgcactccagcctgggtgacagagcaagactctgtctcaaaaataaataaataaataaataaataaataaataaataaataaataaataggaggatcctccttttatagatgaaataatgaaaagtaggtgaagctaaacattttttgttaacacttcttagcttgtaattgtaatagttgaatttcaaagtcaagtttgtctggttccaaagtccatgctttctccagcatgaatgattctctacactggttgactgactgcaagccactagttaatctgtaaaatcatgttgttactgagacagtattttagaagatggttgcttagttttatgttgattattgtgcaaaaatggccactgatattaagatagttttcttatcaaatgtctttgctctgccatgttctatactaagtgctccatatacattacagcattccatttttaactctcataaccctgaaagatagaaattattatcttcattttacacatgaggaaacagagcctagtgccattgagaagtgtgtccaggtgcatgtggttcgaaagtggcatgcagtgactcagacacaggccagtcacctccacagcctgtcactctgagccgctccgtgaacgctcttcaaattaagatccaagtccaaggtttttagtgctcttatacccgacattaattacccaggcatttctaaatattgtttctcaaccacctcctggattcataaaaataaaatggtatgtctgaatagataaaattttcccttgaaatcctattaactttttccagcaaactattacagagggcattgtacaagggtcaaaaaacatttttttttcctttgaggagggaggactatttgcgacctggtaacctcacactaaaataaactccaaaataaatttcccagtgggtatgctatgtgaatttccttccttccatttagttttcatgaattctatttcctggcattgaaaacattcttttgaaaaaaaaatattcttaggtgagaaacttgtaatactttcattaccaattcgcaagaaaattcatcttgtttttttcttgattattgtgatttcatatcttctcactcataatggacataatatggtagaaaatatatacaaatcaggatagttcaattagtgaacatttgagtttcatttaaactgttttaagaaagtcatgtagtaataggtaactgatcttaaaataccctagcacagaatttaaaaaattccttatattctttttcattaactgaatattgttgtgattttaggttctgatgaaaattaaattcgacagccttcttttgattgtttatctcaaatgaggttgtcagtacgttttataagttatattactatatttgaagtctgtattctaatccattcggacacatttttgtgtttattctcttctacttgtatgctcagtatttttcctgttattcttgtatgctcagtattcttcctctcattctctactcttggtattactcatcctttaattatatccagtccctgaagccgtccaggccttgcttgtctacatcccgcctactccgcccacacctgagcgtgtcggtctgggctggcgtcagaatcttagcccctctggaatcaacatccctggcgggcagtgatgaacgtctgtgtgtttgataacaggccacaggttattcagggaattagggtgtacattcttgtgaatggtaatattagccagttcaacttaattcaggtagattttcaaatctccaatttattttactgctttagaaacaatgtcagttatatatttgacataccttggtctggtggacttgacaagtttaatgaaattggggtaaatctatgttattaacattaagattttttgatatattttgatattagttgaagtttgtttttaacaatatttagcacaagttatttagtatatagattgccatatgtactggtggataattagggaatgataggtctagctcttgaaagtgcctcagtatgaatgctgcctaggaagtgggagaaatactttaaaatttacatggaagtaaaagataatatatgtggcctttgtatttttaggtcctgcgtatcactttcacttttttccggttagaatccatggacaactgtccacacgagtttcttcaggtttatgatggagattcctcttctgcttttcaacttggaagattttgtggctccagcctccctcatgaactcctcagcagtgacaatgctctctattttcatctctattctgaacatttaagaaatgggagaggctttacagtaagatgggaaacacagcaaccaggtatgtgtgaacctggagaaaaaagcaagcaaaattttgaggttattaagtgttcttaatcagtgttagacttttggatacatgagatgttttgggatctgaagatatataatatttttataatttattttattttattcatttatttattttgagacaaggtcttactctgttgcccaggctggagtgcagtggcctgatcacggctcactgaaacgtcgacctcctttgctcaagtgatcctcacacctcagccttctgagtagctgggactacaggtgtgcaccaccactccaggctaatgttttgtgtgttttttatagagatggagtttctctatgttgcccaggctggtctcaaactcctgggctcaagcaatccatctaatttggcctcccaaagtgctgggattacaggcatgagccactgtgaccaaccataattactttaaaatcaaatcaacctagaattaattagaatttattttgtgtctaaaggcaacaaaataagcatgaaatagaagggattaaaaaacatgagtcttagttggtcccttatcaaattactgaacagcctttttataagctctactagtagtttactgcaggaatattgaggacattgtccaccccttcatgtagtattccttcatcttaatgatcactcaataattttttctttttgttattattttgttttaattattctattttcttttaagtttttactatgcaagttttaaacaaataaaaagtaaagagatcagtataccatgcccccaattcattcatcaatacatctgtggatcaatttcagcattttctcatcttttttactggtgtttttatctatcctgatgctacctaggcttaacttctgatgcttgaaatctgagagtgtaatttcaactttgttcttttcaaagatgttggatattctgcatttccatataagtttttgaatcaacttgtcagttttcccaaagaattttatgggaattacattgaaactataattaactttggaagaaatgacatcttaaaaatattcagcctgccaatgcatgaacataaactatttttaaatttagttctcttttcatttatcctggcaatgttttatagctttcagtgtctaagtattccatatctttgttagatttatttacagatatttgatatattatgcttagtgaaatattaattttctaaaatttaatttttcacttgttatgtaaaaatatgtattttttaaatatttgattttgattccatatacattgttaaattcactcatcatgtctaattattttttgtagattcttttggattttttaaacgtacataattacatcatgtgtgaatgaaggatatttttcctcttcctttccagtctttgtaactattatttcttttccttgacttattgccctggctaggaccttcaataccaagccgaataaaagtggtgaaaaggaaatccttgtcttttccccagcagcatggggaaatgctcaatatttcattgttgaatatgatgttagctgtaagttttcacagataatttttatcagatgaagagtgttctttcctatgtcaactactattgctgtataactaatttcccacaaatttagtgttgtagaacattaatcatttgactttgtttctgattttgtgggccaggaatttggaaagaacctaacatgacagttgctacttgaaatctattcagcagttataagcgggtgtcagctgggactgtagctgtctaaaggctggactgggctgaatatccaagatggcctactccagtggctaccaattgatgctggctttcaatgagagttcaactaggctatggacctgagtgcctacatgtggctactctaaaaagtttgtcttagaatagtgaaactttcttcgtggcaattggcttctctcagagcaagcattacaacagaaccagacaggtgctgcgtgggaatttttcagcctatgtttggaagtcattgtgttatttctgccatactcaatgggttaacttagtcacaagctgacccaaattcaaggcgaggggacataggcccacttctaaatgggagaggtgtcagaatttataaagaattaaaaaaaaacccacaccttttgttcctagttaccaagaattttaaaaaatcatgaatgaatgttgaaacatataaaatactttttctgactctattcaggtgatcatatgttttttgtcctctattctgtaaatatagtgagttaaattgattgattttgaatggtgaatcaactttgcattcatcaaatattttccatttgttcatggcaagttatgctttttatacattgctagattttatttgctaatatgtatttttaggatttttatatctatatttgggtgatattcttttgtaattttgtcaagttacaggtaatgtcaatgttttaaaattaatagaaaagtgtcctctctttttatattctctggaaggatttgtgtaagattgacaatatttcttaaatgtttgaaataatttaccataaagttaattgagcctgcaggcttccttgtgagaaggctttaaattatgattcaatgtatttaatatagatctattcagagtttacatttcttcttttttcagttttggcaatttttttctcaagaaactcatctgtactttcagaatattttcttactatgttttagtgttcgtaggctctgtagtgatgtcgtctcttttcattcctgatattgataatttatgttatcttttttaccttgataagtcttaccaaggatttgttagttttactaatgttttcaaaattccaactattggctccgttaatgttttctgttgatttttatttcattgattttcctcatggttttatcattttcttcccttgtgttattttgcacctaatgtatggttactttaacaattttttcctagcttcttgacttggaagcattgacaaatgagtttgaacttcttagaatttctaatatatgcactaatactaatgcattttccttggagaacttttatttgcatcccacaggttttaatatgtatgttttcattagcattcggctgaaagtattttgtcatttttattttgaattctctgtgaccataggttttattaaaattatactgtttatttaccaatgtgatcactaatcatgcagtatattatttcaatctttaaaatttgttaagatttactttatagaccaaagtctattttggtgcatttattgtatggacaggaaagaatgtatattctgtaatggttagatgtagtcctctacctatattaacttagtcaagttggtaaatagtgtttttcaaatattaaatttctttactgatttaaaaaaatatttgctttattacttagtcagaaagttatagtaaaatctcaaactatgattctagatttgccagctttttgttctgaaacttttgctttatttattttcttacattatttttatcttcttttcccaatatttcaagcatttatgttttcccagctttattggagcttaactgacaaatgaaagttatatatatttaagatgtacaatgtaatgttttgatattttgatatatgtataacttgtgaaatgattaccacaatgtaactaatatatctatcatacatagttaccattttagtcaatatggtgaaaatatttaagatctactgtcagcagttttcaagtgtataatacaatattgttaatgatagtcaccatgctgtacattagatctctagaagctattcattccagagaacataaacgttttagcctttgaccaacatttccctattgcccccacctctcagctcctggccaccaccattctactttctgcttctatgagtttaactttttttagatttcacatataagcgagagcatgcagtgtttgtcctcctatgtctggcttatttcactcagcatgtctccctgtttcatccatgttgtcacaaatgacaggatttccttttctttttaaggataaataatatcccatttatgtctgtgtgtgtgtttttgtgtatttatatattgcactttttctttatccatttacctgttgatgagcacttagattgattccatatcttggctatggtgaatgtatgaatgtattgtgaataatgctgcaatgaacatgaaagtgcagatagctcttccagatatttatttaattttctgtggatatataaccagaagtgagattgctgaatcatgtggtagctctgtgtttaattttttgaggaacctccatattgttttaaatatggctgtaccagtatactttcaacaagggttcccttttctccacatctcatcaatacttgttgtcttttatcttctcgataatggccattctaacaagtatgaggtggcatcttattgtggttttgatttgcatttccatgatgattagtgatgttgagcattttctcatatatttgttgaccatttatatgttttctattcagaaatgtctatttggatcctttgcccatttttaagattgggttagtttgttttgttgatattgagttgagttttttatatatttcagttgtgcttttgtggtcatatccaaaaaaatcactactcagactaatgtcatagggcttttcctgtatgttttcctggattggttcttcagttttaggccttatgtttaagtctttaattttgagttgactttgtatgtggtgtgggataagggttcagtttcatttttctgcaaatggatatccagttttcttagcaccatttattatagactatcctttacatgttgtatgttcttgccatgtttgtcaaaaatcaattcagcataatatatggacttatttctgggctctctattctgttccataggtctagatatctgtttttaatgccaataccatactgttttgattactacagttttgtaatatattttaaaatcaagtagtgtatttttattttaaatgtatttttaaatcaggatgcctccaggtttcttctttttgctcaagattgctttagctatttggggtcttttgtggtttcatatgaattataggattctttttctattttgtgaaaaataccattggaattctgttagagatggcattgaactgtagactgctttgcatagtatggacattttaacagtattctttcaatttgtgaacaccaaatattttctttttttcattaatgtggtatagttttcaaaatacagatatttcactttcttggttaaatacattcctaagtatttaactttttgacactattgtaaatgggattttcttcttaatttcctttttgtacagttagttgttaatgtatagaaatgcaactaattttatatgttgattttatatcctgtaactttactgaattagtttgttcatttattagttctaaaagtattttagtggagtctttagggtattctatgtatgaaagatcatgccatttgcaaacagaccattttacattctaatgggatcatttttcttcagcctgaagaacatattttaatatttctcacagagcatgtctgttgaagacagattccctcagcttttgtttaagaatgcattttttaccttaatttttgaaggatattattacacatagaattttaggttgaccatttcctattagctctctaagaataccacatcagtgtcttgtcacttccataatttttttggggagaggaacctcagcagtaattcttgttgttctcctgaagataatgtgtctttttctccaccctcactgcttttattgtgtgtttatatttaattttccacaacttgattatggcgtatctagatctggttttctctgtgtttgtcctgcttgagagtcactgagagttttgaatctataggttgctttcttttatacaattttgagaaatttcagccaatattttttcaaatattgcattgccacttttttcctctttcttctccttctgagactcaaattacacatatgctgaaggttttgactgtttctaatagttcttatggttttatattcttgccttctttttttgctttgattccatttggttattttgttttggaaagtctgtaagtactgttgaaatgttcttcaactattttgtcaaccttttcctctaagttttatcataattattttggagtcattgtttggtagcctcagtatctggaatgtttctggctttgctgagattgcctgttttatttattattgggttttggttttttttttactacttcctcacaggcctagtcagtttttattgtgagcaggacattatacgtgatatgttgcaggggttctggattatattatcttcctctcagaagggttgggtttttttctagtaggcacttatgttcctggcagatcactttcattcaatcaaggcttgaatttacaggggacctatttcaaattttccatgaatcctggtggattgccatatttcctagaatatgaatcttactcctgtagcatacttttctcacgtttcaattcagttctcagggttttcataaaagtatctcctttctgactgaatgaggcaacacatcccttcagtatttattatgcagtctctcttcaattcttagcaacttccctcccctccgaaactgttctctgttagttagacctgctgtcttctctgtgcatttgcagcttgggaatgagctaaggacccaaggaaatgcctgtacatttttgaggtgccatttccatgcagctgctttccttatagtatgcagctccaaaaccgccagatgctttggtagccctaaatcgtgagttgtttgtttgccatagcaagggtattgctgtctccttgggcttcacttctttgaattcttgagtgtgtatgggacatactttatatgcttctcttttcagagattacagtcctttgctgtttgttctcaatgcctgaaaatgataaaaactaaaacaaacaaacaataattccttactattatcaatcattaatcattgttcattttttcttaagtgagagcaagtttattaagacagtaaagaaataaaagaatggctactccataagcagagcagtggcatggactgcttgactgagtatacttacagttattttgtgattatttgctaaacaaggagtgaattattcatcagttttctgggtaagaggtgggcaattcctggaactgagggttcctcttctttttagaccatgtggggtaacttcctgatgttaccatggcatttgtaaactgtcatggcactggtaggagtgtcttttagcatgctaatgcactataattagcatatagtgagcagtgaggacgaccagaggtcactttcctcaccatcttggttttggtggtgtttgactgccttctctactgcatcctgttttatcaacaaggtctttgcgacctgtatcttgtgccgacctcctatctcatcccgtgactatgaattccttaaactcctggaaatgcagtctagtaggtctcagccctattttatccagcccctattcaagatggagttgctctggtttgaatgcctatggtttattaccccactcccttttacaaggggacctttaatcctaagggttgtagagggatgtcagtccattttctgtaactccttcaggatgaataggggtgatgatattcctgcctaactattagggtctcttgtattcagggtagagaggagcttagtcagaaagcgtcagtatggtgagacccgttcataactctgataaaaggtgatatccacagtctgccagttggtgctacagtctgtttcctatgggtcaggggttttctccgtatcgtccctgtggggtttgccaggaagatgttaccagaaaggattcctgatctagaccccaagagagggttcttggacctttcacaagaaagaatatggggtgagtccatacagtaaagtgaaagcaagtttattaagaaagtgaaagaatgaagaatggctactccataggcagagtggcccattgttcaaatttatttgtgaaagaaatggattgtttgttctgtagatcatcccacatcttggattttgctgtttatattctacatgccatttgtcatgttgtttgtaaactggtgcttataccaaaaagtttggttaaatccagggggttttatgtggtaaaaaataatcttttcaggagatacatgaaatctgcttttctattatgaagttaacattggtcagagtgttctgatctcctcaggttgaacttcccattaaaagcctcttttgcactttctctaatggttttagcattctttaggttcagtatttagatgagttattcattgagacctacaacatgataatagtttgattttattatttcttctttatttatttattatttgaagttctttaatggaatagaagttactcatatcagctatttggttgctctcatacagagatcatgtaggaaaggtaggataaatgcttgattttctctctttttcttttttttaaaaagtattcaaattaataacttggttccttagcattcttcaaaatggtcacttattccattttattttgttttgttttcgatatctgtacatttatatattatatcacatttgatgtgctttaatcaattctaggcatttaaaaatgaaacacttttccgtgttttgtttgttgtgtttgttaataatttgttttcaaaactctggaaaattttccagttagtttctgaacttgttttaaccaaactccagttacctttgaaagctcctttgctttctggtcagaaaagatgttctaggctcttcctgcacattatttacctcaggactgaaaaccctgatttccctaaagagctctgactttttctgtgggaaatggtatttagatctcacaatctgggtgctacggatggctattggtactgggtgtgtcatcgtctctagacctttcagtggacagaattagaaaaaacttttttgttgttttttaaagaaaaaataccctatatattcatagtgatcttacactatattggaatattgagattatagagttgctttttttttttttttttactttacatttctacctcttctctcatacagtaaaaatcctggttcccaatgacatgaacatattatttatgtacttagtcctactgtacatattttcaaaataacaatactaatattattactaatggtatgataactggaaaccatttaagatttctttgttcttttttgtgtatttaaaatatgttttgcttgagcggtatagtcaaattacagtgtttaaggtcccttggaatatttctactctctatggttgtcagctcaatgcaattatttcaccagtttcacttcagttgtgattttaaatatttctttcatttttctcaaattttgctttataattatgtaaaatatatttatagttccaaagccaaatcaatgggcatggtagattatgagaggtctagcttttttttttcctgtcccttccactctgttctttctcccccattagagaacagtttttattagtttttgatttatccttctatttaaaaattaagcaaatgatctcatataattgtattttcctctttcttagataaaagggagcataatatacacactggtctatagttggctttttttcacatcatatatcctggagattactccataatcagagcatagtatgccgctatgtgatgtctcattttctgttcaatcaatactctattgacggacatttggcttgtttccagtcctttggccattttctttttagtcttttgttttttatttttgagacagggtgcgatcgtgtctcacagcaacctcaacctcccaggctcaagtgatcctccttcctcagtctccccagtagctgggactacagacacgcaccaccatacccagctaatttttatttttttattttttgtagcgatggctgcccaggccgttcttaaactgggctcaaatgatattcctgcctcagcctcccaaagtgctgggactacaagcatgagacatcacacccagtcttgtttccaatcttttggaattccaaatgttactgcaacaaaataccttattcacttgtcgtattgtatttttgccaatgtacctttgcgatatctttccaatggtagtattgtttggtcaaaagaaaatgaaatgcataggtttttgctaggtattgctatattctcttatgtagtgatcgtaccatcttgcattctctagcaatgtgtgagaatgtctatgtccccacagcctctccaataatttgttttcaaaactctgcatttttaacattctgaggggtaagaaatggcatctcaattaaggttttatttgctccttctttgtgatgagtgaggttgaacatcctttcatatgtttaagagacatctgaacttttttcagtgcactctattcatgtctctattctttttagaagttctttatattttaggataataactctttgttgcatattgcattttttcttattttgtcattaatcttttcctttgcttatgctattttatgcatttaaaactggtaacttttaaagtattacattgggaaatgcctctttttctgaagaactgagatgttttctcagtaggaacaatgagactcatggaactaatttgtttcattttttactttggcaggaaaatttttatttgaacaacctgtatagctatgtaaatttcatatcttacacatctaaaatgttacctatctcacttatttctaatgtctgtattactacagtctggatttttattatttagtgtttctgtcatttgatttacagtagcatttctcatagaaatctaagccactacagattctttgttaaataaatgtgggtattaatgaagagcaggttcttccagtcactagtcagcaacgttagggggccgatgtggtataatgaggatggtagtggggtcagcatcagaaagcctggctcagtccctcacttgctccattcttggaacagtggctcgatcactacagacatttgaattttttcatttattaaatgaatgttttaactatatgatagtattaagaaaccttctcaaatgaaaattatgtcacacttaaccattttaatatgcaaagtgatctggtttgctgaaacacacagaggttggcagaagttctggaattctttacaatttcacatacagaaattaatatcatcaaagtgaaaaagatgactctacaatcctggtattcatcgctcagatggttcagccctgtttaaatagtgtcagcatgtgatggctcacaagcacagagcttgacacatgggtgattcatttgtttatcaattgatacttctagacttgtaactttataaaactggaaaatgtaaatcttttttaatttatgagggtgtctaaaactgctcatagttatttaaacaaagtttggcttcttacgccaagggctctgatcattctccataaattatagcatctatacaaatgtaacattatttttccctcttattttagagtgtggaggtatcctgactggtccttacggttctattaagtctccggggtatcctggaaactatcccccaggaagagattgtgtctggattgttgtaactagtcctgacctcctggtaacatttacttttgggaccttgagcctcgagcaccatgatgactgcaacaaagattaccttgaggtaaataattatatttagatagaacatatcacaatatgattaggactcagggcactatggtctagccatgcccatggatgaccccaaaatattagctgtagttaggtgtgtttctcaatagtcagtcaatatctaactcttgcaaagtctctatttttaactgtgcctgtttgttgcttcttcttctgggttccatttgaatctgggaaacagattaccttgccctgctatggtgttacctggaagctcacacccctgccatgagaatgcagaatttatgaaataaacactcagtaatagccatctccttcaatgcagattcaaaccttcagttgtctgtggtaaactggcaaggtctttcacagcttaactgtagcattccacgaagaggccgggtgtggtggctcaagcctgaaatccctgcactttgggaggccaaggtgggcagatcacttgaggttaggagttggagacagcctggccaacatggtgaaaacccatctctattaaaaatacaaaaactagctgggcgaggtggcgggtgcctgtaaccccagctactcgtcagtctgaggcaggagaatcgtttggacccgggaggcggaggttgcagtgagctgagatcgtgccactgcactccagcctgggtgacagagtgaggctctgtctaaaaaaaaaaaaaaaaaaaaaagaaaaagaaaaataatagtgattgtgttgaactgggttaggttcctggaataaagtaatcattattactgagaggagaggtatcagccgaagctccttctgcctacccattagtaaaagattaaaatatggaggaggagaaaaggctcttatattcaaatgccgtttgtacgtaggtgcatcaaaaagtgttgctcttcatttgtagactgacaagataatggagaagattgagttcccaggttgtcctgtattttttatcaccataaatctcagccccttgcagcagtgtgaaaaagacaatacgcatttccaagtccattagagaggaatagagtcaatgcaattattcataaaggatagaaggatgtggtgtcaaaaaggggctctgcaagtaaaagtcattagtaattcagcaataatggatttgaaacctttgggaatgactggaagatctgtctctctctggaaaatttctgcaaaatggtcatttaaatgttgacagaaaagtgagttatcttgaaattaattttcaataaattccatcaagttaaaattagaggctttaaaaaattcctacacattcatttctggagaccatatggtagaaagtgtcaaccactctgacaatattgaaatgtctctcatttctctttaaactacagtatttcaaagaaccagttaaatattagaataaagttatgctgccatctaactttgatcccagtaagaaaagtaatttgaatagacaaaattgaccatattaaaatattctttagttcattgactcctcggtggtttatatagtatagaatttgcaattacaacaaaattatagagagattgacatgattacatcatagattaaaaaccaacaattagaaaaggatttctaaggtcacgtcattatcattgtagtacttacttactatcaaagttgcatttttaaattcactaacctgtctttctgttgtgtctaatctgatggcacttcctctctacctctgacccttctgaaaacctggaccaagttatgaatcagttggcatcaatggtgttccttcttctgttttctttgcttatattcattttcttctagatcactaagaatttataatgaaaaaaatcaaaagggaaagatctttgattagtaacatcatgacaaaaattctaactatatgtccagccttggaattgaaatccagtcacaggccaggcgcggtggctcatgcctgtaatcccagcactttgggaggccgagatggtcagatcatgaggtcaagagattgagaccatcctggccaacatggtgaaaccctgtctctactaaaaatacaacaaatagctgggcgtggtggcaggtgcctgtagtcccagctacttgggaggctgaggcaggagaattgcttgaacctgggaggtggaggttgcagtcagctgagatcgcaccactgcactccagcctggtgacagagcaagactccatctcaaaaaaaaaaaaaaaaaaattcagacagagagaaggcattggggtgatgggagaaggagacacactttgctgaacctcagccatgagttacatttggatgtgatggggaaacttccttgagcgatcacttttaaatgatagattttatgaagttaatatccaaagtgacctagtttgttaaaaatctgaccactttgagcttaatgattcatccttttgttttagattcgagatggtcctttgtatcaggacccccttcttgggaagttctgcaccactttctctgtcccaccgctccagactactggcccctttgccagaattcacttccattcagactcccagattagtgaccaaggcttccatatcacctacttaacatcaccttgtaagtaacctaccagttgggggcttaagagggatttgaaggccaatgctatgcttacatctgttttatattttaatgtgattcagaggatgactgactgtcttagaccaagaacatttctttataaatatttctctcatagcttcatattttttctttatcttcccaatgctctattattaatactgcaataccctttgatccctaaattatgggatccacatcatgataaagatgtatgaggcacccaaacttaaataattcagggcaccaggtccctcgtggtgtttgatgtttagttgtgagagaggtttgtgcatgcgagcagtgcagtctctctggattttatcctcgggtcaagtccagctgcacaggggctggggctggcttccagcatcacagtgtcccagactctagagcttcacttccagccaaatactattagctgttaggacctcagttgctttgataccttaaaacaaacaaacaacaaaacacaggaaatactctatgatttggatttttttagggaagtggaggattttgtttatgacatctattattgtgcccttaataaatgttctcagaaaaagtaccttttaagtttcaatatcaggaagagtaacaaagaacatctttacttgtcccctttcttcatttccttttctttccacggaatctggtgccaacctcctgttcccctttcaattgttttccgtgcaaatcaactccccctggctacatcttgctattctgtattcattttttctttaatctgcttcatgtatacagttatgtagtttattttgttacatgtttttaataaccatctcaaatcttattgaaatgaagcagagcattaatgtatttaaaaagcaacttatagaagagaatggcagattggaagctagatcacacatctctgcatctatttctttaagccactacagagatgtcccacaacacatcaaactgaaaatcttaaaattagaggcacaagcctatagagggtgaataaaatggatatgtgcttgtgtgtgtgtgtgtgtgggtaaatttttagaaattggatccaatgcctgcaagccagagcaatgccattgccatgacctgttcgtctcttccctgttcttagcggatctgcgttgtggtgggaactacacggacccagagggtgaactcttcttgcctgagttgtctgggcctttcactcacaccaggcaatgcgtctatatgatgaagcagccccagggagaacaaatacaaatcaacttcacccacgtggagctgcaatgccagagtgacagttctcagaattacattgaggtaactttcactactcaatcgcccttagatgacattcatcaacatttttatattctgcagagtggtggtcttcaaaagattgttgggccaccagcagccagaatacctgagagcttgttagaaatacaataataactaagctctaatgactaaggtgcaggcaaataaggctgataggatgtactaataagatacagatttattatctagaataattaatacaggaaagaactcaacccagggaagtgaagggatttgcccagatgacccagctagtcaagtggtaataaagtttaagtgttgaatgacccttgttttggaggttagggtttttccttcctttattctgcttgctctcctccagaaatctttaattttgatttaagtgtgggtaatgattgtaatacagggaatatttgaaacagagacaggctgtttttgtttgctgggcctggtatttcttatgctaaattattggtcaagccacaaattaaagtgttgagcaagataaaacattgtttttttgggcataatcattttacataaactagagaagaatttacaattttgtttgtttgtgcaagttaaatccatttattcatccaggaaaaacctatgtgacctcctgtcctcttctttctacatttagacagaggaaacagaactttagcataagatctagctagacttagttgaagtgcattgaccatagcactacagcagtatgtatgtatgtatgtatgtatgtatgtatttatttattttgagacggagtttcgctcttgttgcccaggctagagtacaatgtcatgatctcagctcaccacaacctctgcctcctgagttcaagcaattcttctgcctcagcctcctgagtagctgggattacaggcatgtgccaccacgcccggctaattttgcatttttagtagagatgagatttctccatgatgggcaggctggtctcaaactcccaacctcaggtgatcctccggcctcagcctcccaaagtgctgggattacaggcatgagctactgcaaccggcctgcattttttttaatccagaaatttttatttaagatcatttcagaatgggtatatttattcaatttaggttttctaaagtctcttataaagtatattaaagttttacactacggaagaatttcaaatatttttatgtaaatcaaaattaaattattaacccttttttttttaacttttgagaacagcaaaaatagctttcaattagagagtgcttcctgtactccaggcactattataagactttaaaatagtataacaaattaaatagataatgatcattgtcagcttactgcctgccatgtgtggtaagtgcttttcgtgagttatttcattgaatcctctcaacaaccattattatttctgttttaatcttaggaaactgtagcccagagaagttacttgtccatggttacatgtctagcaagtaatggagctgggattcaaatttaggagatctagttatacttatcttcagtaagaacagaaatgcaattgtgtgacgttgactacaagaggtgtctcatcttccatagggaggaaggtcttgtgaattacccaattccatacctggctctccgatcacgagactaaaacatgaagccgagcatcatgattttctcagatacgcaagaatgtaactataattttcagggaaatttggggccctttctgttaaagccttcatggtgattctctggttctaaagaactatcagtacctctgaatggttcatcctctcaggctttgcagaacactagaactgaatttcagtgagcggttccatgaactcctctgaattcttctgaaaagtttgcacaaaaaatcataaaactggctttggaagttttaatttcataaaccagaatggtggaatgttttgtagccagaaggggattaaagttagttcacctaacttcttattttagttcatttgtcagatgaccgtataaccttggacaattctttatctggatctttcagttcctacttcagtaagatgtcctatctatttctctaaactttgggggtagaatcaaggaaataaatgataaaaagaagcttgaagtgttaaaaaaaataatgcaaatgcaaggtttttctggaacaaagttttaactctagccttgaatttatcagttcagagacagccgatgtggctgtcacagttggccagcgaggtatctacattctgatgtaaccacatatcctcaaagtcttgaccaaatttccctcaaggattgttgatggaaaaaaaaactgtattattcagaaggagaggtcatgtacggtgatttaaatattaatagatagatttttatattatatctttgaccaaccaacctaaaggaatacaaccaacctgtagaattttggcatcagcaaggaccttaattttacaaatgagaaaattgaggctcacaaaggtcaaactctagttattgtcaaagtaaaacttagatgtacctctatgagattctagatggacgtacattgactttggttaaagctcttgtctttaaatcatctctatccattgggaaaatttgtgaactgaacccgttttctaaaaagtatattcacttctcttgttgttcttcagatagtggtcatacaagaaagtgatacaggaaccaaattctaatgacattattatgactcaatatattgttccctaaaatgatgtcttcattttttaaagctatctctaaaaaatgaaatatttatgaaaaagaattaaaaaaagaatgttggtatttcaaatactttggtggtttagaggggggttgactttgtcctttactgactccattgatgagtaaaagcagtccacccaaaattttagaaagagtggagaagagaaaagaaattctacagagatgtgggagaatgatcctaaggacatttactttgcatgtgaataggtgtacttttaagaatcctagatcttctctttgtgtggttttaggtgccttggttgccaggcaaacatatccttcaaatgaagattaaggtaccattgctgagtgtgtatctttcacagatactgtggttttgaaagacttacttttgctcagtaagagagttccataagcactcattaaagaatagattttaactgcaaaagataagaatgatattgacccagtgtagcatatctttctttttttttaacacaaggaacacacattaacatgttaattcttagatttatatatctctcttaagtgaagtttctacttttaaagatatacattacccatggaagatgtgacatggctacaaatgaatgaatacaagaacagatcaattgttagttcatctgtttttgtcgaagagagcttttaaattgtatagaatagttcaatgaaggtgatggaagcatctttccagaataaaaagcagcacctctcattaatatttcataagtgatttaagccatcagaactctgagtgaaggacacataggtagtaatgaaagtttaattttaaatcccagagaagggaagttgtaggctgaataataaattcagaaggctatacgatgttaaggtgaaggcttgaggtaggatacgaagggaaatgagtagaattgttcacccatcaaatctccttgaccaatcccaaagtatctgcctcctctccccagagacactgaggaaccagaaagggggctctacaagagacgcagggagagcgatgtgccttctggagaaagagaagggctttcgagaagttgttgtttcttagatgtggaaagcaaatacaaacagaaaagttgaaaaatataatcaataagacaggaaggagtaatttacattgaattttatttctgaaatctagggaatatacctgttctacaagtggcgttgaaccctaattcatcatattttagacctctatggcaatcccagtaaattaacaaagcagaaattgtacatctcttcacaatataacataacccaagattatttataaacattttaaaatgcccaagtgtgtggaagtatgtgaactctccaaaataatcattggcttgagaaagaaataaaaaatgaaagactacatagaaaatgacaaacaggaaatgctgtgtatcaaaacctgtgagatgtgatgaaactcaactccctggtaaaatctttaagatttaaaagaagagaaccaaaataattgggaaagcaggagagcagaagctgaggcaggaaggtctgtcctccgtctgaaccttttctttcaccaccttcccctgcatccttccctctacttctccctccccgctacactcctgcttcagcctaagcagccctcccgcatctcctgcatgtctttagatgaatgcaaattcacaaaggacctccttttgtgacttcttaggcattgagatgattccactatgagcttgggattgggtgggggagagccaggacttgtggaatgcatgaggcacttgcttccctcaagtggacctgctgctcagagtctcatggctgcaattcacagactacacacctaaatgtcagaaaaagaataaggcctggagcaagcaaacacaccacataggctgaatagtattgtgtttttcagttaagtacatattgaaattaattgtaggtcagaaaaatatctttctagagagggtaggataaagggaaaagggggagatcctcaagagtttgtactcttggccaggcatggtggctcatgcctgtaactccagcactttgggaggctgaggtgggtggatcacctgaggtcaggagtttgagaccagcctggccaacgtggtgtgaaaccccatctctactaaaaatacaaaaaagtagccaagtgtgatggtgggcacctgtaatcccagctacttgggaggctgaggcaggagaatcacttgaatccaagaggtggaggttgcagtgagctgaaatcacgccactatactccagcttgggtgacagagtgagactccatctaaaaaaaaaaaaaaaaaaagagtttgcattcttgagcatattggatttagggttttgacagagactaggaacatttggttagactctgagctctgttgttgtgagcacagtttttccacaactgctggaccatcgtgatgctttttagtgaaggaagaagataggccattcctctagtgaaataattctgtaggttggagtagtgggaggcaggaaacagactgagagatgatagaacacctaatttggagttgtgagaacttgtagagaatacatttttgctgtgtttgaaggagttgcatgctcatgtagaagctgcaaacccattgaacatgcgtgatgtagagcagtaagcaggaataagaggatatggatggaccattatcaagaacattacaaattcctaggtcaaatagagggtatggctggtacttttctgatataaaatggaaacaatattgcatggaaacatgataaaacccttcagctctctgtgttactaaaggcaagatacctgtaagccacagcttcctcatgtgtaatagggatagtactagtagtactagtagaaagagaccattcattcatttatctattcattctctaaatatttatcaaaccacttaggtttcagtcaccatgctagggaatgggtatgtaatatagatattaaataagtaagcacacactacataatttcaagaggagataagtatgggcaggaaagaaacagtactgtaagagaaaagaacagagctactgacttcagtggagcagtctgagtttgcttctcaagggtctttgtatggctagctcattctcatctgtagaccctgtatgtaggatctgcagatgaggagtgagcaatgcaaagaactgagagaaggaggactccaggtagtggtgctaacccagccctagagactgaagtcagaaaaaataaactaaaataattggaaatagaccagggtggctggaatcacacagggatggaaaagagaaatatgagttaggcaggagctagaccctgaagggtcttgtagaccgagataaagagcctgggttatattctatatgcaaggacaaacaattagaatgttccttgtcacattgtgcctgtcacacaatgaatgctcactaaagttaacatcatgatgataatgacgatgatgatgatgatgatggggaggagaagagagggcaggagaaggtgacctactggagtttgcaatcatgagggaaggcacttctaggtaaaacttattcatgtgttcttgattttagaatatcagatcttaaaagatcagattatatttattaatagagatgttagaagggacactttcacaaggcatgaaaaggtttaaaataccaactctaaaaatcatgaaacatactaataaagaacaaaggataataaccaaagtaaatgattttgagatcctaaatggcttctctcatctcttatcctcctcaccccttattctctcactgggggcagggcctcattcctctcctgctcacccagattagcccaaggctcctccctaaggtccagtctttacttagctaagatgtatgtcagcctgaagctcacttcacagaaagccacatgttaaacactaccatacggtgtggttctcttttcagctctcagatggactaagcgtaagtgccagcatatttgaattgctttgaattaaaatttaatgcttattattttagaaattatagtataaaaccaaatctggattcatagcagaggaagacaaatgagcgtgcgtattaagacatggctttgggacttgactcattccagatgttaaagctcacgactcactaggctcaaaagcccacatttaaaatttcatgtaaatggtgtttctcagcaaagtaaattttagttctctctatagaaaatcattcctttacaaaaactcgtttttttttatgagtagtttctcttctggaactagtttaatctgatgaatgtaaaaattggaagccatttggaatacaccatatgctgaacatcctgggacctgaaaccttcagtgtttcctggacgaataaggcaatccacaagaaatctgaacctggtccgtgaaacactagaattttgaattggttcttgttgtttccttgcaaatgcgattcactaaaaagaatgaattcactgtgactcctctgcaagtgatcacggcatggcttcacctgacttagaaaaattcagtttttctgcacaaaccagactcagatattggtcatctttctctaggttatgctgcaataacaaacaattagtagcaacaaccagaaaaatcaaaaacaataacaaaccaaaagcgtctgtggctttcaataacgtgtttattctttgctcacaatagcaggttagttttggatccattgcagttctgtttcctatgtcagtttcctgtgccttcaccgtcctgagacccaggctctagagcttgctgggggaaaagtaaaagatggttgaattatgcagtgacttccaaagcttctatgtggaaattggtgtatcacttttgctcacactctgttgggcaaagcaagtcctatggctaagcccatagtcaatgggaagattatgtattaattctccgtatggcagtattgcaagtcacatggcaaaaagcatagatagtcaatccttttacaggaagggaagtgaataactatgtaaaataatgccatccatcccagttcatgagcataaaggaaagaggtttttttttttttttttttggtgggggtgcaaatttatcaagtcctagattattgaacgcaatacatgcttcagaggtagctagggtcactttagaacatttgatgaattttattctagtgtctctttcaaaggagttgtagttaaagtattgccatgtctagaatccagggagaatacaggctttcagaattaataaggtttcatttccacagagagagagagaaacagagccaaaatcaattgcaccttctaggttcagggcccttgagccctatgagttcctcttaaaacatttggactacagctgcctttctccttgttaaaatccttgaatttcattagttggggcccaggggaatggcccactttagcttgcagtgatgctatttggctgttttttttccttcttgtcatcttctaatgggcgaaatagaaaagagagactacaatcttcgaagaagcaaatagaaccctggaggattagagagcaggaagataactttgtgtttcatgctttctagttttcaagaactgcagtatgtctgtatctctaacaaaaactgaaccatcatactgtaccttaaaattaatgaatcaacaagaatttgtcaaatacctatttgcaaagttttttttattagatgctgaagggcaaacagaaatttttcccttccctcagagacttactgtttggttagagataaatttagcatagctttactacaatatgtgaaatttgtgttacagatgttgtaagagctcagagaaaggaactagtatgagcctgagtcagtggagaggcatgtgatttttcatgtctgtgtcagactctatcatatggctgaatcattatttatttaatcacctcactattattaggcctttagaatggtttcaattattgttattatagagcagactttgatgtggatctgtatatgtcttttcctgcatcttgaatatccttgtgatacagtgttagaagtgaaatacccttaatacatattgtcagtttattttccagaactttatacttccaccagttatggatgagagtaactgtcgccacatccctaccaactttgaatatcatccttttaaaatctttcctttactggctaggcacggtggttcacatctgtaatcccagcactttaggaggccaaggcaggcagatcacctcaggtcaagagttcaagaccagcctggccaacatagtgaaaccccatctctactaaaaatacaaaaattagctgggcgtggtggcgtgcccttgcagtctcagctatttgggaggctgaggcaggagaattgcttgaatctgggaggcggaggttgcagtgatccgagatcgtgccactgcactccagcctaggtgacagagtgagacttcatctcaaaaaaaaaaaaaaaaaaaaaaaaaaaagaaaacaaagaaaaatcttctctttactacctgtttgccttggcctagataactcctactcagctttcaagtctccgcttaaatgttatttccactgagttttccataatcccctgggtgagttcagagtctttggttaacccagtggttctctacaatttaagactttttaatatcactccttgattattcagaaatgaaatacactgatttaaccccactagacacattatatttaaaaatatgtaaagttgtaagaataacattaagaaaaaatagagtaacagaataaaatcacatttatttcagtatctgaaaacctaggcaagctgtacttgaagacaaaataaagcagttgattgtctggaccccaaattgctatgaatatgacagtacaaatgcaggctgacacagttatgtgggttggtgactaatttttcagaaatagtgactaactcttgacagatttccaggagaaagaatcttcaatttacactctacttgtaatcctggaaaattcagtatgcattaaaattgcacaaaactactttgcgcttaatatgtaaaatagagcgagattttatacccaataacagaactttcacttatgtgaatgtcacacaggttcaggagaattcttgttgtgtgtgacgctcacatttcaggctgcctcgtgtctttggtcccttgctacttactaaatgccagtaatgccccatgattgctgtgataataattaacacaaaaccaaaaaggtactctcacacatttcccaaatgctagattgtggtccctgctgagaaccattggttaggtaacaatgaagtatcctgcgcttccccaaaaaccgcagtcatcatacttttcaaaaatgttcctgcctattgtaagttccttgtgagcagtgactgtttcatggtattgtcacctgcacagttcctggcatttattcatgccttgataatgttaatgaagtgaatgaattaatatttggatgtctgtatccttcagaataattgtactgaacagcggcggtatatatatccatcgaataattcctgctcatagtagcaagcctccagtgtttcacctccaaaaatgtccagaataacaacagctatccttagtcaacattttccattaccaaacatttggctaaggaattcacactattgtttcatctgtttgcttcaacaatcccatgagcttagatagagtaacttgctcaaggctattaagtgaggtggtttgtaagtgacagaggtaggttttgaacccaagtccatagactgtattcatggccactatactataagagctggctatttggccgggcgcagtggctcacgcgtgtaatcccagcactttgggagtccgaggtgggtggatcacctgagattgggagtttgagaccagcctgaccaacataaagaaaccccgtctctactaaaaatacaaaactagctgggcgtggtggcacatgcctgtaatcccagctacttgggaggctgaggcaggagaatcacttgaacccaggaggcagaggttgcggtgaactgagatcacgccattgcactccagcctgggtgacaagagcgaaactccatctcaaaaaaaaaaaaaaaaaaagagctggttattgatttaaaatcagtagtctattatatgaaggaaattccttttttttctaataaaacaggaatgctaacaatgttttttgaatttatggagttatcatatggcttatcttatctgatgtactgaggaagttaatttatagtttataatttctaacctttcttgcactattattattcccatatttgatctggtatataagctggcaatggactgtgaatttatttttctagaactgtgtttaggatttgtgtatctatattaataggtgacatcagtctatagtttttatttctataatctatgttgggatttggtaacagcgttctaacaaaaattatttggaaattattctatgtttgaggatggcttagaataaattatacatgggaattatctcttccttaaaagttttaaagaatgtactaagtagagcatcttatgggagatttttctttttgggggttgagggtgggatgggaataattatttgataatgttttcaattttatttatgacttatgtctgttcaaatcttatttttcttctccttcagataattttaatgttatactttttctgaaaataacccattaaaaacattcatagagttgtacatagatttcacatttaaaaaaatcttagtatctgtgtctttgtcattttcaattttgtatatttgtgcttatatatttattttctttttagacttgccagagatttgtcttttatatccccacccataaccttcctcaaaaaaacagttcttgaatgtatttatgaataccacatgattttgtatttcatttattaagttttgctcttctttttactgtattcttcctcattttaaggatttttttctaacttaaaaaaattgtacatagagctgggtctcactgtgttgcctaggctgtctccaattcctctcaccttggcctcccaaggtgctcagataataggtgtgtgccactgtccctggccttctttctaagtttttaagttgactccttacattcttttactttctctctctttcatcaacttttcttttttttccttttttctttcaatggcaaaagtagtttagtccataactttctttgattgcagatttggctaacacgtgtattttttcataggtaatattctcattttttattgttttccaagtagtctaaattgtgaatttatttcctctttgacattgtgaaaattattaggagaacattctttaaattcttgtgcttttggactttattggcttaggattttatcagcatttcatgttattgcattgtgcttaaaaatgacctactgctttagaaaataatagaaatatgtaactcaaattggattatcattcattttgaatctgccattttttcatctccaagtaacgccaccattgccgacgtaagtttctttatttgaattacatctctattttatttttctctttaggttcgagatggtgaaaccttacttggaaaagtctgtggcaacggaaccatctctcacattaaatccattactaatagtgtctggatcaggtttaaaatagatgcttctgttgaaaaagctagtttcagagctgtttatcaagtcggtaaggaaacatataatttttaaatgtctaatttgcctgattgtaatattttaattcttcaaaataatttagtcattttatgtcctcaagtgttaagtggaaaatattctcatagaaatgttatattcggttatctcctcaggcagtattagattttgcaataaaattgagataaaattattaatatctggacaagcactactataatttttatgcttacagcttgcggggatgaattaactggagaaggggtcattcgctcgcctttttttcctaacgtgtatcctggagaaagaacctgtaggtggaccatccaccagccccaaagccaagtcattctcctcaacttcactgtctttgaaattggaagttctgcccactgtgaaacagattatgttgaggtaagagggaaaaaatctttgaatttgtatttggttgtatattataaaaaatattatgggttgttgtcttcaaatctgttataggaaatgaaagtagtttatgtagaccaatatgtcttatggatacatatgtaaaaatcctcagcaaaatactggttcagtgaatctagcacaaaaagaggatttatataccatgattaagtgagatttgtcccgagaattctaggttgatataaaaccccagaatcagttaatgtgatacatggtaccaataaaataaagaacaaaaactccatgatcacctcaatagatgtgagatctggattttgctggatttgacaaaattcaacatcctttcatgatgaaacactcaacaaactaggagtagaaggaaccttccttaatctcataatggacattcatttaaaaactcacatctaacatcatatttaattatgaaacactaaatgctttgcccctatggtcacaaaaagacaagaacgtctgttctcactacttctattcagcattacactggaaattctagctagagcaattaagtaaggagaagagataaaatgcatccagaatgaaagggaacgagtaaaattctctctattcacagataacatgaccttgtatataggaaatcataaggaatccacacacataaaaaactattagaactaatccattcagcaagttgtgggttatgagatcaaaatatagaaatctttctttttctatacaccagcaatgaacaatttgaaaatgaaatcaaggaaacaattccatttacaatagcattaaaaaataataaacatgaaggaatacagttttaaaaataagtgtaaaacttgtcctctgagactataaaacgtccttgaaagaaatttaaaaagacctaaataaatggaaagacatttaatgttcatggattagaagacaatattgttaagatggcaatactccctaaagtgagctaaagattcaattcaatccccataaaaatcacagcgggctcttttaaaaaaatacataagctgatcgtaaaattcatatgaatatgcaagggaaccagaataaccaaaatgttcttgaaaaattacaaagttgaaggactcacacttcctgatttcaaaacttagaacaaagctacaataatcaagacagtatcttattgaagtaaggatataaatatagatctatggaacacaattgcaagtccagaagtgaacacatacttttatggccaattgatatatgaaaatgatgccaaaacatatcaatggagaaaaatcattttttcaacaaatggtgctcaatagccacatgcaaaattatggtgctggaccccttccttatagcatacacaaaaattaactaaaaatggattatagacctaaatgtcagagctaaaaccatgaaactcttaggagaaacctaggagtagtctctatgcccttcagtttaggcaaagccttcttaaatatgacacaaaaagtacaaacaaaaaaagaaaaaagaaaaataacttcctcaaaattaaaaacgaataacttgatttttaaaatgggcaaaggaggctgagcacagtggctcacacctcatcccagcactttaagaggtcaaggtggatgaattacttgagctcaggagttcgagaccagcctgggcaacatagtgagaccccatctctacaaaaaattttaaaaatagctgagtgtggtaatacacgcctgtagcctcagctactcagaaggctgtggtaggaggatcacttgagcctgggaggtagaggctgcagtgagctatgattgtgccattgcaccctagcctgggtaacagagtgagaccctgtatcaaaaaaaagaaatgccaaaaacaaaaggacacacccataggatagctataataaaaagagtcagataatggtgtggacaaggatgtggagaaattggaacctttatacactcctggtggagatgtaaactggtacagccaccttgaaaaacagttggcagttcctcaaaaagttaaacatagagatactatctgatccagcaattctacttttagatatattctcaaggggaatgaaaatatatgtccacacaaaaatttgtatgtgaatatatctacagtcatcatctataataacatatacaaatagcaaaatgcaatcattatttttaattttaaaagtagaaacaacttaagtgtccatcaactggtaaacggataaataaaatgtggtatatctttacagtggaatattacaaggcattaaaaaagaatgaaataatgatccatgctacaacgtggatgaactttgaaaatgttatacagtgtgaaagaagctaatcacaaaagaccccatattgtataatcccattttgtttgaaatgtccaaaatgggcaatctacagagacagaaagtagattagtggctgcctggggctgtggtttcaggggaatgaggagtgactgctaaaggatatgagtgttttttggggggtgactaaaatgtgctaaaattgattgtattctcaaattgatttgtactccattaaaaacatttcagaaataattattcttgaagcagttttcaaaattgatatacaacatatttgaacatatcttctctaattttagattggtagcagttccattttgggttctcctgaaaataaaaagtattgcggtacagacataccttcatttataacatctgtgtacaattttctttatgtcacattcgtgaaaagttcttctactgaaaaccatggtttcatggctaagttcagtgctgaggatttgggtaagagactgttcccttttttttttcctcctcttgggcttgtatcagaataagtgaatgatagaaataaattatatgaaaatcatctgtactgtgaaaaattttaaagtacactcaaagacaaagaatgtatattttctaatcaacatttatatcaaaagttaattgttacttattaataagagaaaaatcaggttatcttaagtggcaactaagaaacatttttccttttaatctttgaagaggttattatcagagccttttaatttgaaatccaggtagcttggttacttgctgcagtaattataatttttatttcaacagcatgtggagaaattcttacagaatcaacagggaccattcaaagtcctggccatccaaatgtctacccccacggtatcaactgtacttggcatatattagtccaacctaatcacctgattcatttaatgttcgaaacatttcatctggagtttcattacaattgcacaaacgactacttggaagtttatgacaccgactctgagacatcccttggaaggtaaggttatgtttgtttgtttgtttaacaataaaacttcactgatttcctgcttcagtgaaggatcttaaaattgaccacgttgtgttatgaaaaccaggtgagatcctcatgcttcttaatgaccatttctacataactactctgtagttgtggccttgtaggcattaagttttgacatctgtatatattcatgaagtcaaaaccaaaattaaaataatgcatatatccactacccacaaaactttcttcctttccgttataattccttgcttttgttcctcacccccacccacaggaaaccacaaatctactttctatctctgtagattcgtttgcatatcatctaaatggaatcatactatacgtactgaatgtttttctgactttcctcaattagcataatttttgttgagcttcttggatccgaagatttgtagttttatcaaattgaaacattcttggccactggttcttaaaatatttttctgtctttcctccccattagggactctgatttcatgtatattaggcacttgaaattgttctacaactctcttgatagtctgtttgatttcaagcctctgttctctgtgtgttttactttggaaagttcctattactatatattcaagttcactcatcttttcttatgcaatgtctaatctgctattaactttaccaagtgtatttttcatcttagatattgtagttttcattttagaagttcaatttgagtcattttatatgtagtccatgtctctactttacacatgaattttttttctctagcttaaaaaatctgtgagatatagttgtagctattttaatgactttatctactaattcagacatttggattgtttcctgctatggttttatagattgatttttcctctctttctgagttatactttcccacgtcttttcatgtctgggtaatattcagtgggataccagacattttcaattttatgtttttggctgctggacattgtcatattcctgtaagtattcatgagcgttgttctggaaagcagttaagctacttggaaacaggttgatccatttcagttttgcctttaaactcatttgtttcctgtctctgaaggtttgttgtcctacattgcttgatatccagtgttttgagagccattgttttatacgtttttgtccaggatttttgttgtttcaggtgcaaagttaaatctagcctgttattacatttctgttggaaatggaaatcttttgatattttaaaatgtctttatcttgcattttattttctttatttctcattcatgttttaaatatccttcttatcctaatctttcatctttttaactttcttctttttcttttttgggaaggtacttaacacatcaccactgcaaaatacagaacgtttgctgaatggcataaactataatgatcttccccaaatttcatatacatgggcatatacgaaggcatttaaaatatcaattagttcacctacctttattttgatgaagatattaaattttttttcacactgcaatggtattatacaccaaattttctttctttttctcctttagcaattgacgtatccatttcccgtactcaacatttcctctctttttggtttctatatttgttttctttatcatttcttttggttaattttaccaagtgtgctttgatttgagattcctattttattgtcacttcttcctacaggtatttctccagataaaagctcatggcattctgtcttttatcacaactctctttttaacattaatagaatagtttttctgagctaaactgcttttgttcagcagaaacatggcatggctgaatcatcactcttatctctttataagtgagctgtttaaggacaatagattccctctataggggttacgattgtaggcactgttctaagtgctttatatacagggtattaactcatcacattctcaaaacaactctatgaagtaggtactgtcatcattcccattttagggatgaggaaggcaaggcacagggattgagtgatctatgagtttagattagagagatgactctatgattttatgatatattgtttccctttgttgtataagtttattacatttctattaaaaagtgtattaatatgctatatggcaatctagtgtagcttttattaaacttctcatacatgacaactcacatagccagtcacatacctaaaaccatttcagggatataatcatgaacgggacaatctttcgtaagtttgcaaatcttttttgcctgaaatatatttgtgttttaaggttgatgagaggtagagaacaaaacctattattatatttacatgtccaaatttttgttacatcattttcagtataccaaactaaaatacacacatctgtcctttcttggtttggaatagatactgtggaaagtcgatcccgccatctctcacaagcagtggtaactcattgatgctggtgtttgtgactgactccgacctcgcttatgaaggcttcttaataaactatgaagcaatcagtgcagcaacaggtaacaaaacagcattgcatactcggttttattgactccattgcaaaacagtgctaatagctaaaacacaatgagaatacatcatccgcaaacctgtggcacacaatgagagctatatttagaataaagggtagtgacttaaataccttccttattaaaagtagtgactagataagaatattgtgtcaatattaaatcttctaatgttggtaattgtactgtggttttgttaaaagaacgttttttcttcccttaggaacaatacactgaagttttcagacggtaaagaaatataatgtctccaaagtactctgaattggctgagataataagtgtgaatatttgtgtgtctgtgcatgtgtgtgtggggggggggggagagagagagagaaatgataaagtaatgggagcagaatacaaatacataataaatctgggtaaaaagaattcaggagctcattcttgcatcttttaaaattctatcagaatgaaaagttaccaaagagactgaatacttatgttaagaaattagaaacagaataacaatgtataaaaattagagactaccgcatgaaattccagggaaaggaatggaagatttcttggcaaaatatgcatttctcaatttgacctaatgaagttaaacttttcagcatttattcctttcattgtatttttcctattacttaatttctcattattactatgccctttgcaaatgaagtataggaaacaaatcccttttgcaggcacagtctttgaggtaagatgtgaaccagagatgctcccagccccaagagcctgtgcatgggattgatgaaggagtcatatttcgttaggctcatgtttccctaggatgtgttgttttttagagactctgagctttccttttgcatcattgtattaaaggacccaaataacatccagcatagacccatagtaggcatatggtgaccatgcttccaagcatttctccgctttgggattaccccagcagcatggtacaattcactgagctccctccagaaagaactggtagcttttcctatgttgggacatgcaccctgtgacacactctggcatcctgagaaccccagatgcttatcttttaaagtccccactccctaaaataaataaaagtttaaacatctcccactcaaaatcttacccaatttcccatttatttctccttcagaggggctggccactactcttcatttcaggcaaaactctgcagcagttcaagttctatgttcaaaagcatggctttagatttgctccagaatcctgagtgtgagagaatcaatcaatacttttctcccaggtaggaacctctgcaggagcagttcattatccagctcaagtgcaagcacatgcgaaatggaatccctggcagttacaataggctatggtgtgtgattgacgtattcactggacttcattcaggtggttaacatccagtgaccaaaattggtttcttaagaaattatagggtgcacacaatttttcatgctgttgtagttttatctgtctggtatgtttggccccaaagcacactgaatattagatcaggatttggagcaagtcacttgaactctctaggccacagttttctcatctgtaaaattaaggaattggatttggtaatcttcgagagatgacttctggctttaatcatctatgaacataattttaatttggtgcatgaataaactggctgtatcttagataacatataatacaggcagggcctcctgaaaatgtggaaatctttgtaatgatatgcaaagtaagacatacctttgtaaaacaattctattaccatcctagcttgtaaggcaatattttgtgcagaaagaacccagagcagttaaaataattgggcagggaggatattagattttaattctaaaagttttcagaaagataagatacacgtaaaataaaaatgagtcaggaaaagagatagaagcaaactggacaggaaaggaaactataaagaaagagagaagaaaaagcaagcaataaaagtgaaggggagacgatgttttcatagaaactcaaaagattctccagctggcttccctgtgtgataatcattactttggcctctatttggtctgcataaggctgaaatcacagacgagggagtgtttgctttctgtccctgggctgagcccggctggtcactgtgcccgcttgttgttggatgaactcataggtctgactaacacagtcaagccattctaaatagcaatcagatgacgagatccaggaagacacaacacaccttctgtttataattctggagcctgtcacagtttcccatagatcaagacctgagagatcggctctcatgcattgctgagggggggtcctgcagcattttttagggaagggctggtgtcaggagactgagctggtgttgggctggtgacaccaggtggtgggctagtactttaaggcagtggctagacctagaaggcagccagagtcagagtgagctgctggtgtggaaacacagagatgctaggactcattcttttcaggtgtcatcgtatgttggatattttctgcagaataaaatagcatcagggaaaagcatcaagggaagctcagtcatttgccctcatcttactttattgttctaacagaagttatttccagagcagtaatgttggtatttggttgttgatttctagctcctcagcccaacaggtgtgagtttgcctgctgaagtctttcttgtcttcatctgataaaggttaagtttccggatttgagttcagatacttttccatctgtagtttgtgccatgtggctatgatgtcagccccaaaatatgtgtttgggagaaaaaagattggtttcttgtgattactgggacttcctcccttgttactttgtttctgcctttatccagatgtgcctgggaaaacagaaagaaaagaactaacaagtacaggtttaacaggttaaaactcttacgaagttcttagaaactacaagactaagctttaatttaacgtattagattttgctcattcaaactacaaaatatttgaatcctgagagactataattgactaatgttatcaatttaaagtaaaattttatattctattaacatgtattgcatatacattaatatataatcctgctaagagggaactttaaaagtataaacagggacagataaatgtaccggattcattttcaactttaatattagaggaaaacctatgtaacatctagtccagtgcttttcaaactgcaattcatgactcattcgtgagtcatgaaattaatttattcggttgctacttgtgattgctaaaagtatggagtaggatagaaaggaataggagagaaagtatcagagtttatcatacaaagtaaggtgccgcttcatgagaactgtttgtagtatctccgcgcatgggtggctaacgtaaatgtattttttagggtatgtcaagaaagtttgaagcacaaatctattccagttaccttaatttttaaatgagggagatagaagtctaggatgttgaatttatcctcccaagaatacatagctgattggtttgaaagtcagactaaacaactgagtcccgtcttagaatccattgcttttgccatgtctaggttagctcttagaaacgctctaaatgaactgcatataacagctagtaacatttaattcagggctatcatcaaactgtggtggatttttcatatttcctgcaaagcgaaaaccttcacaattgtccagggaaatggccaaggatgatcccaacaacaacaacacaggattagagatgagccctactgggctttcttggcctccctccttcccagggcagggttcccacctactcatcagtgggtggttagtgctgttttttatcagtgatcctggaatgagctcagaagaggcatctagcagtgcaaagttaagaaatgatgacaaacatgcccaaagaggccttctttacactaaacgggtaaagagagttctgtttctattttaaaacttcagtttgggagtgtagtgttctcaaattctagtgttcataaggaatttgagatgggggattttcttgctataaattcaggcatctgggccccacccagaaattctgattaaaataggtctagggtgcttgttcgccaagcaattcaaggggttctaatgaaactttgtagtttatcaaggactctgaaagtcaagccttagcatgtgaattgctgtagaattacaagggagatacaatagtggattggactgtaactgctcatgatggaaagtactattcatgacacagggaaaggggatgctgtagggaggtcagaagtcttggtcctactctcagccttgatactaattaggaatacttttgtttgtttgtttttgggttttttttgttgttgtttttgttgtttgttggtttgttttttgagatggagtttcactcttgttgcccaggctggagtgcaatggcaatatctcagctcactgcaacctctgcctcctaggttcaagtgattctcctgcctcagcctcccaagtagctgggattacaggcatggtcaccatgcctggctaattttgtatttttagtagagacagggtttcaccgtgttggtcaggctggtcctgaactcctgacctcaggtgatccccccgcctcagcctcccaaagtgctgttattacaggcatgagccaccgcacccagccataatttggaatactttggacaactcacaagcctctctgattatttctatcgaccttgaattctgtattctttgctatgagagattcagatattttccctctggaaaaggtgttgtagtaagtcgattcgtcttttaaagatttactttcttactggctagtgttttctcataattttgtatgtacaggtgtcccagcacttctctgctcagttcgtttatcttgtttgttatatttcttactccttagaataaaaatgcaacaaaatgcttaatcatgatattctgagttccctacttgtcttcatccttaaattgacatttcctgtgtagaaaaaccagggattgtggccaggcagggtggcttatgcctgtaatcccagcactttgggaggctgaggcagtcggatcacctgagatcgggagttcgagaccagcctgaccaacatggagaaacccagtttctactaaaaatacaaaattagccaggcgtggtggctcatgcctgtaatcccagccacttgggaggctgaggcaggagaattgcttgaacctgggaggcggaggttgcggtgagagaaaatcgcaccactgcactccagcctgggcaacaagagcgaaactccatgaaaaaaaaaagaaaaagaaaagaaaaaccagggattgttaaagagaataggatttggaaagagggaacttgggttcatattttatcttggccatgtctgaagttaagtgtcttttagaatttaatctccaggaacctgagatctctcatctacacctctctaaaaagtgtggtgataatgcctggctgttttgcaaagttgaggaagacaaaatgagacattcaatgtgaaaattacattagagttgtaaaggaccatgactttgccagatataaaatatgattctcaatatccaaggacaattttacaatagctactttgcttatttctatatgaatctgcactggtcatctgagagggaaaagaaaaagcaatgaccatgaccgcctagcagaaaattgtagcaaaatgttgagtttgattgagaaggcttcttctttcttaagggagaaactgaacctgtaattatatcttcccttgggtcttcactttgaaggatgctaaaccaaatatgtctgtggaagcagatgatggctcctgggttagctgtttatttagcacattcctagaatatcagaggtcatatggattcattcagaaaccaaacatttcataagtgatttcagaaagcatagcctaaagattgagcctcaatgtaattggatagtcacataaatcatcccataatgcaaagcaggaaggagctggagcagttccccataatctagagtctccctatgagatgcattcctctctccagaggatcagcttatcctatttctgtggctcaaattttatgggactgatatcattgttgctttgtggtttggaaggttatagatgtttctcattttcccctttgataatgagccaagtcctgtgttacaaaaacttatttgaaaatgtttagtgaaggcaaagatacattgtgagttttagaaaagtctagttttgtgatttttgtaatggtccacagaaggcatttgtatgttttttcatttctttctttacattttttttttttgaggttggtcagagagaaaaatatgtgagttttgccaacagttgtctttgatcctcagagatgtgcttttccattgctagttcagttgaatttaggggataggaaaaatgtactttcatttttcatttctttgtaaatgttcttagaccataataaaaggctaaactgatattggatatgaattttcctttggcaatacaagataaaataaaaggcatagatacatttttatctttgcattttgtattgatgtaataataagcatcatgccaacacataaatatccttgtatggaaacacattctaatttaatcatttgtgctttgttgaaaatcacaagaggaaaccaaaacttagtattgatatttttcagtattactattattctagaaggagccatttatattgtcaagggaagaaatgtaaacatctatagagttcagtgatagttaagaggggtttttaatctttcaagaaatagatgcattaagttcagagaatagtaatttttctctctatgaaatttgaatctcataaaactaccatcaggttttaagattaaatatcctattgtttaatacgtgtagcaggggtcccttcaaatatgatgttttatttctctatttcaattttatgtattctttattagatatctgaattatttattggactttctctagagagtgcaacctgtctgtgcacagaactttcaagcttttaacataatatggatttttccctgtaatttcagtaaatttatccataattttcagaattgtgtacacccatttaactacctctccattcaagctatcgaatacttctgtccctccagaagggatcctcgtgttccttttattagtttcctcaacaacctctatgtcagcaaacacacacctggtttctaccaatatagaatagttttaactgtgcaaaaggcagctgtgaacaggaatacatagtatgtattcttttgtgtctggcttcttttttttttgagacggagtctctctgtcacccaggctggagtgcagtggcgcgatctcagctcactgctacctccgcctcccaggttcaagcgattctcttgcctcagcctgcccagtagctgggattacaggtgcgcgccaccatgcccggctaattttttgtatttttagtagagacaggttttcatcatgttgaccaggctggtcttgaactcctgacttcttgatctgcccaaattggcctcccaaagtgctgggattacaggcgtgagccaccgcacccggcttggcttctttcatttggcataatgtgtctggaaatttttcatgttgctgtattcatgtgtttttttctttctattgctgactagccttccattgcatcgatatatcataatttgattatctgttcacctgttgttagatagttgagcttttttttcccagtttttagctattacaaaaaaagctaccatgaacattgacttgcaggttttttgtggacgtattcattctcttgcgtaaaatacctaggagtagaacttctgggtctcatatggtaatgatatgtttaactttataagaaagtgccaaattgttttccaaagtggttatgccattttatattcccacctatatgattgacaattctgaaataggagttggggctccacaccagaccagatggaagactggctaaaacagggaagagacagaagcacctctgcataagacatgcccaacagcgccatgacagtgtgccattgccatgacaacacccagaagttaccatcctttttctagacatttccaaataactcaccccttaatttgcatgtgggtgtaaatatgactgcacaactgcgccaagctgctaccctcaacacgttgcctatggggtagccctgctctgcaggagcagtcacggagctggaacactgatacctcagtgaagctgattttttctaccaccagctcacccttgaattctttcctggccaaagcccaaaaccttcctgggtggagtcccaatatgggggcttgcctgccttgcagcagttcttttctccatctttcccaatccttaatattgccaatcttttcatttttagccactggcagttgcatagcagtatctgatggttttattttgcatttccctgatgactaatagtgctgagtccttttcacgtgctttttgacaattcatttattttcttttgtgaggtgttcattaaaaccatatggttcatttttgtttgtttcttattaatgagtcatatgttgtatattctgcatacaaatacgtcctttgccagataaatgtattgcaagtattttcttccagtgtgtggctaaacttttcttttccttatggtatcctttgaagaacagaagttcaatatatccttttatcccttttatggttagtgcattttgtatcttgtctgagaaatatttcactaccgaagttatcaggatctcccacgtgcatccttctagaagttgttttttttttgagacggagtctcactctgtcgcccaggctggagtccggtggtgcgatctcggctcactgcaagctccgactcccgggttcacgccattctcttgcctcagcctcccgagtagctgggactgcaggcgcccgccaccatgcccaggtaattttttgtatttttagtagagacgggtttcaccgtgttagccaagatggtctcgatatcctgaccttgtgatccgcccgcctcgtcttcccaaagtgctggaattacaggcgtgagccaccgcacccggctccttctagaagttttatagtttgagattttatacgtgttctatgatccattttgcatcaatttttctatatggtgtgagttatgtgtccaagtgtgtttagcaaatggtatttaattgttcaagcaccatttattgaaaagattctccttcacccccactcccactgaattgcttttgcatttttgttgaaaatcacctgcctgtgttcatgtgtaggtctgcttctggaatctctatttcatcacactgctgtacatatttacccctttaacaatagaacattatattacttaatgttacataatttcatattgtatattaaaatctggaagtataaaacctctagattggtacttatttttcaaaattgtttgggctatcctagattttttgtgtctccatattcattttagaatcagcttttcaatatataaaaaaacttgagaatttgattgagattgcattgaatttacagaccaatttggggataaaggtcatcttaaattcagccttccaatccatgaacatattttacctctccatttattcagatcttccttcatttccttcagcaataaagttttcagtgtagagtttgtgcatgtttctattaaacttgttatcaagtgtttcgtgtttttatgctattataaaatgacatgccatattatatatgctattttaaaattttactttctggttgtttggctgatatatgcaacataaatggatttttgtatacatatcttgtattctgcagtcttgtttaactcagttattagttctaatgacttaaataaatcctttagtatatactacatagatgacaataactgtgaataagttaaataagttttattttttcccttctctctctctgtccctctttctctgtgtatgtgtattgctgtgatggctagaactttctgtgcattcttgaacagaaagggtgaggttggaatgttggcctttttcttaatcttgacaggaaagcgtttagtcctttaccacttaagtatgatgttagctttggattttccatagatgccattcatcagtttgtggagttcccttctgggcatacttgctgagtttttatcctggataggtgttgaatttttctgcatcttttggtatctttcaaagcttttctttttttattctgtttaggtggtaaattatgttgatttagttttctactgtcaaaccaatcttgtgtaatacatcagaactccacctggttctgatctattataacttttacgtgtattcagaattgttatgctaaaattttcttatggatttttgcatcagtgtaagacatactgaactgtaatcttcctgaatttctttgtctggtttggtataggagtaatattggtcttgttagttagaaaatatcttctcctctattttctgagtttgtggaatataaacaatttcttaattgtttgatacaattccaccagtgaaattatttgagcctgtagttttctttgtaggaaggttttatattacaaatttaatttcttcaattaatagagactattaaagctttctatttcattttgagtcagttatgggaattttgaaagaattcatctattttatgtatgttgtcaaatatatttgcacagttttttgtaatggtgtctttctattattttaatgtctgaagattctatagtgacatcccctcttcattcctgaaaatggtaatttgtgttttttttcttttttctttgatcagttttggtagaattctatcaattttaataattttctcaaagaaccaatttttgacattgtttattttctctattgctattgcattttccatttaattgatttctgttcttatattatttcatttaattcttgccttagttagcttttctctagtttctttagataaaaattaactacagatagatagatatagatatagcctttaagcactacttcacttcacctccccagttttttttttttttttgagacggagtttcactctcgttgcccaggctggagtgcagtggtgcgatctcagctcactgcaacctccgcctcctggtttcaagtgattctcctgcctcagcctcccaagtagctgggattacaggcgctcgccaccatgcctggttaatttttgtatttttggtagagacggggtttcaccatattggtcaccctggtcttgaactcctgaccacgtaatctgcccaccttggcctcccaaagtgctaggattacaggagtgagccactgcgcccagccacctcccaaattttaatgttttattttcagtaacttccagttcaaaatattttccaattatcttgtgatttcttctttgttctatggattatttgcaaatgtattatttaactttcaaatatttgcaggttttctagatgtcttattgatttataatttcagttttattgtggttaaatgatatactttctaagttttcaattgtttaaaatttatggagaattgtgttacagccctgcatgtggtctatgctgctgaatgtttcatgtatgcttgaaaaactgtgttgtctgcagttattaagtgtagtgctctctgtcaattggctttaagtcggctgagtgttggtcagattttctatacccctattcatctttatctgtttcattttcggttactgagagaaaggtgttaaaatcttcaactctaatcatggttttatttttttctttaatttttgccttttcactttccttcgtgtattttgaaactattacttcatgcatgcacatttaggattattatgttttactgataaattgtcccctttgtcattatgaaatgtctttctataaatctaataatattatccttcttgaagtcacttttgtttgatattatttcagtgatttcagctttcttatatttactgttcatatggtatatcttttttcattcttttagttacaacttagtttcaccattatatataatggcatcattatatataatgtgcatgcatagtaaaaaacatataattgggtcctgctttttctgtgttttagttgaagtatttagaccatttacaactaatgtaattatttttatggttgaatttaacataccattatggtagttgttttccattcatctctttttgtgttgccattattctgtcttcattttggtttacagaatattattagtattccattctatttccttcattgtctttttaatgatacctttttttttgtatttttacattaggtctaaaaatatactccttaacttataagcaagttttcttagagttaatatgcagctgctttacatttcataccttccaattcatacctgacacttcatattacacaaattcccctttatacttcacaagtgaaatactgtcatactagtgtaattccatgtgcctatccttctgtgtgctgttttagttatatcttttacttctctctgtgttataaattcaccttactattatttttgctttaaatcactaattctctctctctctctctcttttttttttttttttttttttttttttgagactgagtctcagtctgttgcccaggctggagtgcagtggcaagctcccagctcactgcaacctccaccttccgggtttcagcaattctcgtgcctcagcctcccgagtagctgggactacaggcatgcaccagcacgcctggctaatttttgtattttttttagtagagacagggtttcaccatgttggccaggctggtctcggactcctgacctcaggtgatctgcccacctcggcctcccaaagtgctgggattgcaggcatgagccaccgcacccagcctacttctctctatattataaattcaccttactattatttttgctttaaatcactaattctcttttaaggagataatgaaaagaaagcctatcatttatatttatacaatgatttatcatttccagtgttcttcattccttcttggagatattttctgtttggtatcattttcctttggcccaatggatattattatttcatacagtacaagtcttccagtgacaaattatgtcagcttctgtttgtctaaaaatgttacactctcgttttttaaaaaagtagttttgctggatatttaaacctgttttccccatctcaacattttaaagatgtattccattttcttcttgcctccattgcttctgtttagaagccagctgtcatccttatcatgatgtccctgtatgtgatgtggcttcccccccgccccaactggcttctgtgttttccttgtttctgttttctaatagattcactctgacatgtccaagtgtagttttcttttatttctcctgtttagtattgactgaactcctatatcttactagacatttttcataaaatttaggagaattttagccgctatttccttctccttttttggcccatttttattaccttcttcttctggttctctaattgtatgtgtgttaacctatttgttgttttttctttgtttttttaaatatctgtccattttcctggagttcttttttctttgttctttagattaaattatgtctattaatacatattaaagtttactgacctttttttcttctgcctacagtttactgttaaacttgtcatgaagttttaatttgaattagtgtaattttaagttatataattttcatggttccttttaataattttctccctttttgggccaaaatttcatatctgtttactttttaaggctttttctttaagtctttgcacatatttttaatggctgctttaaagtctttctcttttaaatctaacacctggatcatctttgaatcacaagatgacattttttttctcaactatgaccacatttttcttgactactgatgacatttcttttcttgatttgattcatattttctcattttttgttttgtttttttaagacggactctcactctgtcgccaggctggagtgcagtggcatgatctcggctcaccgcaagctccacctcccaggttcaagcgatcctcctgccttagcctcctgagtagctgggactacaggcgcccaccaccacacccagctaattttttgtatttttagtagagatggtgtttcaccatgttggccaggatggtcttgatctcttgacctcatgatccacctgccttgacctcctaaagtgctgggattacaggtgtgagccactgcacctggcccatattttctctctttttttttaatatttgtaatagttttgggttttatagtggacatgatagattgggacatgatatgggggtcccatatcatgtgggtaaattatgtgttgtagacactctgtattatcttatcttcctctgaagctagtttgatatctagctgattactttgtatctgcataggtttatatctgtacttgctaaagaatatttgtgaacatccctgtttctcgagcccctctaacttgctaggtctctacctccaacttctatgattcctgcaggtcttgttaagacttatcctttggcccggaagttctagagagccctactcttggccatggtcttcacttgtaagatatggccttttaggtgtctcatttgaatgcctgaggtgttaaggaggtatccccattctggaatgggagagaactctaaatgatcttgtttccgcttccagcctagtagcagctcctgtctgacatgctttctgaagtctcaccttatgtattctcagcccaggcttagctaagaatccatgggaagccctactcagatgcccggctttcctctctatatacttcttcttctctgtagaatttccatatagttccagctgctttggcaactctaatctttgcatcatcagctcagtaggactgtcattcactacttggacttcagctcccttctgtggtcaggaaattctgcacaggtagaaagccaaggaaatcaagagtcgtacatcatgagtttcctttctgtcaagaatcacaatcttgtactgcagattgtccaatattttgttcagttttacagttcttaaggagagcagctagtttagtacagttgcttgtcatagctggaattaaaaaaatattaaagaacctcagccaaccaggatagagtacaggaagaagagagagagaggaaaaatgaggtgagaaaaatagaagtcgtaggattggagtttaggggtagtttgaaagagaagaactgaatggagtagggagagtgggaggaacttagatgcatgtaccagtccccttcgtttccaacacatcatgtaataatatttcaacaactacttactgggacctcatctgggccaggtactacagtgatagtaaataatggttaataaagtcttagtcatatcccaaggtttagtaaggtaaatatactcacataaaaacaattacaaaatatgtttggggttcaaattgctatttgcataaaattttattatgctaaataaattaattctgcttggttgggaaaggtttcagccaaccttaaatgatgggtaagagtgtatatgttaaactgtgtattggcaggggttgttgggtggcgggttaggtaaagggtaaagcatttcagacaaagtgaatggtgtaaatatcattggaacacatcaagaactgtagtttacttttgtgccagcaacagaaaagaagcttggtgagtaaatcaaaatttcagtacagattaacagactcccaccagttgttccagaataatcacattcatgtaagcaagataaagggaaactacccatcattattgccccaaaatgtcattaattcaggttcctccacctgagacctaatcacacttaacattctcccacagacaagttgcattagagatatgcaagacaattgtatttcccctccaggagtacagtgagtaagcaagaacaagtgacgacagataatttcctctaaatatttgatttactggccaaagctctctgtgtgtgggtcaatgagtctgtctgttctgtcaactcagggatactgggtcattgctttcatttgatgtcctttttttagcttagtaagtttcattactgggtctgaaatattaatagaccaatgctatactcctccccgctctctttatccctcttttctgcctttcctgttgtctcccttctgtctgtcttattcccttcctctctaccttcctttccacttgtggaaatattttggcagactacagagaagcatacttttctatacttttggagttaaacataatctttggtgttaaatgtcactgtgaattccttcaataaagtaaagccttgattgcttgctgtttaaaatagagtaaaatcaaatatctggcgaatgcccattcctttgagagctacacacagatagtagaacctataatatgttctatgcatctctatgttttcaataccaatgattcttcttttctgagcttggggattatatagcagcaactagggaaacagcataactaaacatccttattattattattattattttgactcacaatgaaacacaatagtttattgtatccaaaacctttcagtaggagacctctgtctactcctataccctagatttaggttatggctggatgcaattggaaatacattaaaaatgcatttatttgctgggcatggtggtgcatgcttgtagtcccagctgctggggaggctgagacaggagaattgcttgaactcggggggcagaggttgcagtgagccaagatcccgccactccactccagccttggcaacagagcaagaccctgtctcaaaagcaaaaacaaaaacaaaagcattcaaaccagattttctttgtaaaatatttcagatttggagggcataggagattgagtgggtggtaataaacacagaatcgactgaataggtaacgttaaaactgttaaactagaaaagtttttaaagaagatatttatttaggacttcaaaattgtccaggtactatgctaaatgttttataaatgacctaatgtcttccttataaagtaaatgaccaccatttactgagtgcatatcatgggctaagcccttgtaatgcattatctttaactcttaaaccttcagtcaaaggtagcaatcctcttcatttgcgagatgtgagaactaaggcttagagaagtacagtaactctcccaaggctgcagagcttgacagtgtttgagagggttttcattcgagatcactctgatccttgagcctgggcccttattcttcaccccgtggtggaggtacctgctttgtcatttctcataaatgcatgctttggtgaaaaccactttaaagggagcttatgaaaaggcaagactgaattatttctaggccctcctgcagtggatcctaatttttaatgtttatggtaatttgcaaggattagaaaaacgtaacactttcaagacttaaagggttgtttactcaagatatatataacaatttcctctccatagcttagatttagtgttggtaattattttgtctttaagattacaaaaactttgtttcagaatgaagtctttatttgcacattccagaatggcttattgaaaatcaagtataggcacaaattaatgaaatacatattactggatgtattataaacatatcaatattttctattttctctcttatggtctgtttctgttcacagcatgtttgcaagactacacagatgatttggggacattcacttctccaaacttccccaataattatcccaacaactgggaatgcatttatcggatcacagtgagaactggccaactgattgcagtgcacttcacaaacttctccttggaggaagccattggaaactattatacagattttctggaaatcaggtcagcacttttatttatttcattataatcttttcattatttattctcattaataatctttcctaggaagattaaggaaaaaaatatggaaattctctgcaaagctccctgctgtgcactttcttgcaagaaataaagtttgtcatttggagcctgacttaggagaaatacaggaattgcataagattctgtggttattttgaagtgattattttattggaaatacttgaaaataaactccagattttatgtgggcaaagaaacagatgtgctactactctgaaatgatgtaacttgctactgttgaatacctactttaattatgtaaaatcgatgtaaattttaggctgtttgctgttcatttaatctaattatattataaaatgatggcaggatagcaatcttaaagttttcacaaagttttcatgttcaggtaataaaagtctaggcttgtgaatttcagtacaaggcattattctttcattatcatcattttgaaagaatgtgtttaaaaagttatatttgcagtaaaagtaagttagcttatatgttactatctctccatgccactactttgagttaaattaggctaatcattctggtgggcatctatatcaaatgttttatttgggattttaaatctggaatcttatgtattataaatgttattctataatataaagtaaggtattaaaataataaatcataattggaccctatcgtgctaaaatgacataattttcttaatttacagcagttactcactggactttgatgttgaataaatcccttttttgttgtttgtttcaaaaagctacagattataaactagaattaaggccccagaagtttttaggaaaatgctatttccagaattttgctaagtatatcaaatatgatatattacatttcaaaaatttccaaatcagaaggaaaacgttgaaagattctctgtaaaatacagcagtatgtttatatagttaatagtatagtttctttatcgtgttttctctgacacatttgccagaggctttattcgaaagggtgaagattaaacatattctctcagtttgtgattggttatataaaacaccataccagctatgaatgatggttattctttgttaagtcattcaaatatgatttttaaaaatttaaaagtgaaaatcgtgttttttagagtaagtgtagtgtttgagagaaattacttcatccaataaactgctaatgtttgcaatcccaaagttcaaattatgttaaatgtttatacagtaatattgtcagtaacccaataaattttaatttctgtattctgccagagatggaggctatgaaaaatcaccattgctgggaatattctatggctcaaatctacccccaacaatcatctctcatagtaacaaactatggttaaaatttaagagtgaccaaatagacacaaggtctggattctcagcttactgggatgggtcatcaacaggtaaatagcaaagagctgtcttttactggagaagccaatctgattggtttcttgattctgggattgtcatgctctgtccctcacttgtccatgtttgcccagctgtatttaaacttcaatattgcaaataattttaaattaacagcagccatttctttttaacagacaaagggagaaagttctagtttctttttatcaataaataagaatcctggttagaataaggaaattgcattaatggaaattggggctgggtgctgtggctcactcctgtactcacaaacactttgggaggccgaggcagggggatcacctgaggtcaggagtttgaaaccagcctggccaacatagtctctactaaacatagtctctactggccaaccccgtctctactaaaaatacaaaaattagctggacgtggtggcaggtgcctataatctcagctactagggaggctgaggcaggagaatcgcttgaacctaggaggtggaaattgcagtgagtcaagatcatgccgttgcattccagcctgagtgacccagtgagactccatctcaaaaaaaaaaaaaaaaatagaaaaaaataaaaattggatttttaggctataactactctttcatgatgccattttgctgtgcaatttgatttaaaggatagtagaatggcaccagtttaatgcagacaaaaagattcaatttccccagaaggaaaggggtgtgtgtcattccacttctttctcctgtaggttgcgggggtaatctcaccacttcaagcggcacgttcatatctcccaactacccgatgccctattaccacagctctgaatgctactggtggttgaaatctagccacggcagcgcatttgaactggaattcaaagactttcacttggagcatcatccaaactgcactttagattacctggctgtatgtataatgtttccatcatattgttccctgctcccatctcacccaacgcacaatgcacttatttttattttcgagattcaggaaaggggagcatctaaaccgaacatccatataaaaattcaaacaaaataaaaacataaaagaaatttggtgaaagtgaccatcttcgaagtactcaatggctcgatacactaagtatttaaaatatattgatagactattaagatatggtgaaaatctcctgaaagggattacaggatttattataatcattatttatgtttttccacatatgcattgaaaaatcacaatttagaagacagttttggcgaagtagagaagataatatgagtcattccactaggatttttcacagtacagcaattcaccattgttcatttgttaaaaatctaaataaaaatgtattgaagtgtcatgaatcataaactatggaatcaaaaaacaaggaggacagttgacatcagctgtggcattacaatatgtattgggctttcattttcaatattcagccttcagtgtaagctcacacgcttattactgctgcacatgtccacagcttaattgcctgagtttatggcctgagtttataaatacctaaatataatttataaggttattttatttcatggctattcttttgtgatgtcatatatataacaaaaaatatatatttattatatataaagatatatttattttatatatatttatgtttacatataaatatttaatacatatataaatatatgtatttaatgcaaatataaacatatgtgttgaatacatatataaaaatatatgtattaaataaatttattttataaatatattatatataatgaatatttataatattttatatataattacatatatttatttataatatatatacataataaatatatatattttttcttcctcacttcttctggattatagtcctttacataatgtttatagtctcaaccatctaacattcaaaatattttcttaaaggtatatgatggcccaagtagcaactctcatctgctaactcagctttgtggggatgagaaaccccctcttattcgttctagtggagacagcatgtttataaaactgaggacagatgaaggtcagcaaggacgtggcttcaaggctgaataccggcagagtaagtgtgaataccggcagagtaagtgtgtatactggcagagtaagtgtgaataccagcagagtaagtgtgaatactggcagagtaagtatgtatactcgctgttcagtgcctagagtgggccttcaaattcttgaaacaaactgaaataagtgtaacgcattggtgtgagcaattgaacttcatcttagtttcttctgtgaatcgtttaactccatttgagggagaaatacgtattaaatttaatctcatataactaaaacatctggcaaactatagaaacttagaagagtatttaatatgctgagagagttgcaattcagtgaaagatcagtgtaccagactaatgactaatagcttttcatttgcctcacacattgcaatcttgcagtgtacattatattattccaatgtacatagtattctatcacactagtctctaccttaaaaagtaccttaattttattagggaaagctgtggtccatgtgagtcatgcatggaataagcatgttctttacagtagaaaaatctggccattgtacagatgccattttaaatctacttttcccagatagcaacatgatggaattaaaggaacactgagcaaaatgtcaaggggcctggggtttgttctggctcctaacccttgagaaagtcacttttctttgtggtcccatggtttcttcttttagaaaaggagattaaattagatggtctctaaacctgccttctagctctagaattaaatgctttttgaagttagttccaaaatggacattcaagaaaacaatattttcttgaatttgttatttgatagagacttttactttatcaaagtaaagtctaggttttggaaacataattctactgaatcaaaatttatccataattttacacaattatcttttcccacagaatcaaaatttatccataattttatgtaattatctgaaagtggaattaaaagtcacaaaattattaactgtatacacaatatcccttgaattaactgaaagagtaataacatttaaccttgattatgtatgaattttaagattcacattgatttatatctggggattaggctgaatcctagatagttttgaatattaagttttaatatatagctttgttcttcagaaatgtatcactagtacataaaaaggtctcctaagttctatcagagatacatctgtttgactatgtaatcatttatctaattttattactgctgtgctaatctatttctggttataatcagattgtttaagggtttcttttttttcttttcatttctgagatatttttctgtcataatttcagaatcctgaaagtgtaaatgagtgcacataagaggcaaaatcagagcaaactagtgagattatctgtaaaatttgccatgggaaattggagatttacaaatagtgtaaggtctgagtgctgagagtggcccatgtggtttactggaatgtattttcctgggccctgtgttgcccctagtcatcgaggcacgtgatgcctatctgcctaataggtgtaccttctcacagtcttctaaaacaataagattattctttaaaaatcctttatggacaaaactgtgacctaaagattttcaaacagaatgggtttaagtattctccctgctccaacaaagcaatattttgaagagccacaaatgtacacttttttaaaccaaagttataaatggtgttctacccaccttcagaaagcatatcgtagtaggaatacatctatgaatcacactttcagagacagctcattccatataatgtttatttcccgttctcttttattgcacatcatagagataatatattccttgtttaagtcattaggattggctgaactgggcacccaggattagacatacttagaggtatctggtttggttttgttgaaaactcagctcaagaaaatgccaccattggattgaagactttttttctgtaatttcacattttcctttcttctttaaatcctttctactctatctattcgcttggtacttcctgatgactaactagagggagaacggagcctttattgtgaatttcatgcagacttttgaatgttcaacaaagccatgttgttactggtttttagcattcccataggattttgggtttttaaactgttgaatttaaaagtcagaatttctgtcccttccacgtgttaacattaaaaaaacagcagcacagaacgtcgaatgcgcttctctaacaaacaaatcagactgatccctgaatataaccaagttattctgctctccacaaattcaagggaatttgatgcctattttaacatgactatttaattttcatgactctttagtttgaattcacttcagtattatttcacatttcttctaaatggaaatcctttcactatgaaaatactgcaccaaatatatatgtgtgtgtgtctctgtgtgtgtatatatacacacacatatatacacatcatatatgtgtgtgtgtacatacacagatgatttttatttattttttttaaaggaaaatctcatcttggagcacttatgaagtatataatagtggttcttaacagtcatttctttttccagcatgtgagaatgtggtaatagtcaatcaaacctatggcatcttagagagtatagggtatccgaatccttattctgaaaatcagcattgcaactggaccatccgggcaacaacaggcaacactgtgaactacacatttttagcatttgacttggaacatcacataaactgctccacagattatttagaggtatgtattataaagcttgattgatcactgctttttcagatcaagggagatgtgtcaagttagaatccatcatgctttttagaataaaatccctaactctgccccacgcatctataacacaccaaccacccatggtatttgaacaggtatatttcatatttaatgtattaaattgtgaatacagagaactatctatgtttttaggtttcagtgtaacttctggactcattgacctcatattacttaacttacatggaaggagagtaataacctctattttttgttggttgtttttatgtttgttctctgtgtataagagatcagaaaatgtttgggtatcttggatttatttaagatgtcatttttctagtatgaggtatcatggttttaattgttgtttttatttttaaatgtaagttcatttcagtatatttttatttttgtaaaattgaagtttcaattgttataatcatgaccactagtaacatttattcaactgtctgtatgcaatttcaggcaataaatcttgcttaaatattaggcaaccttgaatataaggtaatatgttatttttgcaataagaaattttaacttaaaaagctttttgataacttgcatatgtaacttttagggctacaaattgggaggttattttggcatctacgtttcatcatcagtaaaataactttttgagtcatctaaggcattatctttatttctgtctatattgttaatatataatacttcaaaaaatccacatataatgttttcactagataccctttctgaagtgataagtacttgctctgataacaggacattttttttcccacctgccctcctacctgcagcctagtgacttaaggtagttgtttttaaggtggtcagtgatttttagaagtcttacttacaaagacttcaacatccattgctggcaactctggggtcatattcccaggaaaaaatatgttattcttgtaaaatgttcttaattgtgtttttacaagttgtataggaaaactagcattggttgaggttggttgaggttaacatatattttccaaatagcacttttgtttatgaaaacaaagagtgacaacaaagcattctgcactttgagagactctgtgaggtcctaactataaggagattcccttgtttttcagagataattttttgggaaaaaattttgccttatatttacaaaagtacaatattacagaaatattagccatagtgtttacccattagaaagttttgtttaccagtattctaagaaaatatgacacaacatgaaacaaacttacaagcacgtacttggcaatggttttaaagtccaccttccttgacctggagttcaactggtcttcacaagcttaatgataccaggatggtatcattaagatactactagaataggcatccatttcttcacatggtgagaccttgtttgtgttttagaaaaagcagaaaagttgctttcaaagccctttgtttataccgtgaacacagcagttggtcatacctccttttaccagttaggactattctgattcccactggactgtgggcttctcgaaggtctgtgctgtctcctactaactttgtaacccaggcacttattatacaggtgggacattacaggagttcagtaagttcaagttgaattgaatatcacagccatattttagtatcagtctaatgataactactaatgaatgagaaagattgaattccaaactggcgtttttgtacgacctcctacacacgcagtgcaatcctacaaattggagcacaaaccaaaataggactcatgatcttgccgagcgttgcacgtataacagtgtgctgggcaccataatcgtgatttggtaaagcgtaatggagaaagccacagaaaggaggatgcttttgaattgggctttaaaggaggctttggcagaaagaggggggaggaaagagatgaaacatttccaggacctgaactccatttctttcgactcatttgaggatgaaatggcaacaaaaaggtgtttaaaaactcaaattaaaaaatgcttgttccagcaactgcagagtagctcattagagccccttatggatgacgtgtctgtcatgttatggtcatgccatttctcttgtgcaacattgacggtgaaagagcaaaaatacaaaatgagaaccagaagttcagaaaggccttccaaaaaaacggcgctgttgccagagggaggagattgttttccatctctgtgagccaagaggccagaccagagcaatagctgcaatagctggtctatgatggaaattttaacacacaaacaaccatttacagagagaaaactcacacacacagaaatctagcttccattattttaatcgcttctgggttttttcagctgacttccccaaatcccaactggatgcctgttactagagccagaatttagttattctgaattaataaaatggaaactacaaaaagacttaattacgtgctggtcagacactatcccgccttgatgagaggaatgggtttgaaaagatcccattggaaaccaaatgcatcctttattatttcaccctctgggcaaaacaaaatatttcagatctggaaataaaatatacagtgggagaagggaccatttgcttaaaggagtgagaccatttgcccgtgcaaacatggggaatcaacctgaagagttctggctgtattttacaacttgatttcagtcttccatttttattttgagtctgagtctccatgcagaaaaggagatttcaaacgagtgattgaatatagaaatggaaatgatagatttgggagaaatcaacatggagatgtataggaagcccagggtatttgttaagtcaacagggagcatgtgtgtagtgagaagaggaagtaggaacactaagaggtgattgtggctgggcacggtggctcaggcctataatctcagctactcaggaggctgaggcaggagaatcactagaacccgggaggcggagtttgcagtgagctgggatcgcaccattgcattccagcctgggtgacgaagtgagaccctgtctaaaaaaaaaaaaaaaggtgactgtgtcatgggagccaagggaagagcagtcgagagaggttgtggttcagaagggtcccttggagatcaatgtgactctggtcagagcagtgtttgtggggcgagagcaggaaccagacagtgtaaagaggtacaaagaggagagtgagtgtagactgaagtctaggtccctgaattctgaggctctctgtaacaaaccagagtaagtgatggcttcttttctccaatccttatccttcatttccctaactggtcctcatctagttcacgtgtgtgggacacactcctttgcatgttctcttgtatgtcagtgcctctttaaatgtggccccagaattggatgcaacagttcaactaaacctggctaggcccaagtaggttggaaccgtattatccagttcatatatttctggtggtctatgctgaagttaaatggggtttattgtagctaagtcatgatattggcctatatcaagatttataatctccatatcacttttacatgaattattatgaatttatgattatatgatttttaagaatctaaacagagatatttttcctaataaatcagatttgattttgtctgagaatcccaacacatcatgacctccctaaatcttcattcattgcttttcagagcattattcatttgcatacagactcattggccactgacctagtacttcttcaaaaataattgataaaaatgtcaaacaagattgcatctatttcaaatactcttaaatgataagttcttttggttaaaattgatctattattaagtgcttttggaatagcactattcaaactactaggtaataaaagctaatatttattcagcatgtattatttgccaggtaattctcacagcaaccctgtattataagaaatattatccccattcgttaggtgagaaaagtgaggcagatataggttgttcatattcagaaagattataagtgtcaaggccggctttctagcaggcactgtaactccacaccgatgctctcagccataacaccacataccccgggagcactctcacagtgtcctgtcaccctcacagggatcatggggaagtgttcctgctgcccccaagtctaccattctattgacactgccgcaaagagaaatcaatgttttgcatgactccatagataagcaggtgccatttattataatcacctctttctttgcttcatgttgacaaattatttttagtgtctaatttagaatttttccaaaaattactgttaatcttactgatctacgagattctagaatgaatctttccccatcttggaagctggaacgttttcccttcagccccctggcagccctgctggttctccttgtctgggctcgcactcttggtggtggcaccgaaacacaatctgagccacatgaagaggacaggcgcatgtgacaggctggttactttgagaaggctcacacctccccacacacaggagaggctgagaagcctggagaaggtgggaagccaagagagtgaggcagattctccactcccacttcctaaggctctgctcctgctccctgactgttcccatccattcccatccctctccccaaaggcttcctctgagtttcagcaacctcggaattttagcttcaacaacatgaccaccccagccttgaccctacaggatcatttacctcaagtgcttgcatacaaccagactttcccttggtgacaaatccccagcacagggagctcatgtgtttgagctcgacagcaaatgcatgggtctagcctgcctatggacgatactcattagggcagtgtagccaagccctctagccggtgatgttcacagattatgttctgggcagaagcagaacttgtgagcaggggcatagattccgctggaatgctaaaactttttttttttaatttaactttcaagttcagggtatgtgcactaccctgatagtagtacacataccctgaacttatttattatgtaggtaaacttgtgtcatgggtgtttgttgcacagatcatttcatcacctaggtattaagcctagttctcattatttttttggatcctctccctcctcccaccctccaccctcaggtaggccccagtgcctgctgtttccctgtcctgtgtccatgtgttctcagcacttagctcccacatataagtgagaacatgcagtacttggttttctgtttcctgcattagtttgctgaggaaaatggcctccagctccattcacattcttgcaaaggacctgatcttgctcttttttatggctgcgttgaaaacattaaccatgaactatgcacccatgaattcaccaagattacaaaatcagctctgtaatcactatacctttcagtgctgtggcatataattcccttaagcctggaaaagttcattgaaaagagttgactcttttatcttctaaactggaattccatgtctcttcttccagtttcaaaatcaaactaggcatgtttctacctcctcttcattgacatcacactctcttctgaaagcatccatgccatccgtgtttccctctttcatttgccctagtcacagccttaaaattagacattttttctaatgttcaacaatatttttctgtgccatttcccaaagtttagctagttcgtatgtgtacccataaaatggtcagaaagttccatggagcctcttggatttctgcttagattgatttctttagagggttctccttttttgcaccccccaaaattattcctgattttgtagtgagaatttagtttttcagaatttgccaattttctagaatgttctttcctttttcaattgcgttttcatttgtttattttttttttttatccataggtttatatcttgttttgaagtttgaatccccaaaaccttagtccggttaagtggtcagccatcacaggctctaagttaaggcaaggtgatcactgtctcctattgtcttggtgacttccatattaacaaccacttctttgctagccagaattagtccagagttgcacttctcttcactgtctcctttatatgaagagagcatataaagaattcaacaaatgctacattttttgggggaacaagacatctcataggtgtccagattgttgaaacagtctccccgtcgccactcctgtagatctcttttggtacattagtgtttatagatttcctttacaaaagattgcagtctctactgaaaagaagctgaggtgggaggataaagtccttataactggctaccaaatctggctgcattccagaatcatctggggatcttgttagaaaaatttattcctagtcctcatcccagacttaaccaaatccttgaggattccccaagagcaagctttgcacaagcccctggtccagcacttgagaccactgttcatagcccacttccaccaagatagcctgttttatcctcacttcaatgctctctcctggggagggaaaagtatcttaataggcatcttgttaacatacatttgcctgctattaaatgttactttccagtgaggacttactcttccattgctatggctgagttatgtattttatctcaccaaggcctggtcatacagttgatattatgtttacctcattatattaaaaatgtcagattcactttacagtttttgtattctgattctaaactttctcccccttttccttatcgggcaccttgaccactatcatcttccattaaatcatttccttattccttccccttttccactaaagtccatttcaagtcctcgtgatagtgtgggggacttcagtcaaaggcatttccctccagtctttataacatgcatttcatctcttgccaaatccttgctgatgtcatcctgttcaccccagatgcttatatcacagtttgttgcactcccgtatcctcctttcagttgcaaaataatgcattccaagaggaagaatggataaaaaacatcaccagtatccctgaatcttgcagtgtcacatccatattctccatgtctacagcctaaacaacattttccatataccacgactgagaaacatcgggctcatgggatattgtcaatacttaaagtgatgctagctgttatggagaactcatacattctcagttgcttactgcaacacaggttatttctaatcacatcagagtaaaaggcaggtgttcctggcttccatgtggtagttcatgaaaccaaaggaaggggaagtcaatttgcagaagccacataactgtctctgccacaaatgttggtagatgtttcacaaatagagacctatattctaataaatctgcgatatgccaaattaaaacacaattaagcagggtttgttgttttgttttgcgtttgctgtggtatttcctcaggctgtcactatcctaaatatgcattcttcattcctttatccatgtatccagtcagtaggatatattttagacacttaggctatggacatgtgactgttttagcatcagttttccttgtcatgatggaggaaacacaccttaatcaatttatcacacaataaaaatttaaccacaggcagcgttaagtgctgggagggacaattatagtgcacccagaaggcatgagatgggaactgagctcctttgtgggtcaggaaaggcctccctgaggatgaataacacaccaggtgccaggaggcttgagatgtgagggactggaaggagagcagtgtgaggctctcaggtggacagggacctggcctgcagagcagggtgggcacattaagagtttcagagacctcctggagagcagcaggaggtctttcaaggatgtggtcagatctgcacttttaaaacaatcactctggctaccagaataaactggagggaggtaagagtaacggtggagacccagtaaggggattgctataggccaagggagagagaactccaggtcttcaccattgctggggaggaagcatgagatcgaatgatttcagagcacttaggaggtacaattgacagagatggataacaacaggatgaaggaaagggagacatcagaatatagcctgatagatagaactggacgcagggaaaaccaccaggggagattagtcccaaagagattatccttgcccagaagtctgattaatgaacatctattggacatttgtattccatagaacattctgaggaaaacattattctagagatattttccaagtttatttcattttcccctcatacaaacaagcaaactttgaagttcatgaggcattagagagttattcgcatctcagatgttattttgagaattacagtaatatttgtcattaatggaatgcccatcatgtgctagacactactaccaatactttgatagatataattgtctgtcctcatagtagtccagtaactgagtataagtatgctcacaggagaacagggattgagatggggaaccatactcagtgcaggaagtgtcatcactacatgaagtgatgaaactacgttcacactcagtgctgcacgaatacagtgtgggctctggagtccacctggctccaaagctctttaccagctgtgatcttgggcaaggaatttaacgtctggctgctttggttctctcgtgtgtaaaatgaagataataatccacacacctggaaaatattgagtcctcaggaaatgcttattactcccctccacgccccttctggagagagcccagctcctgcctggtcattcagcttcttcctgggacacttcaggaaatggtttctcacccttacaccagctgacctccatctcttgcaaatgccatctccattccttgtgccctgccagttaggagcagtggctcctccctggcgaggtctatcttcctctccaggcagagttcacattttgttttctttctcttccgagttccctaactcgatccatggacttctccataagggctttgctttctctctgtgctctccgaatctgtttaaaggcaaatttcttctgtccttggaaagaccttgcatccgctctaataagtgaagcgtaaatcagtgtttgtgtttgcagtgcacgtcactgctggtcacatgatggcataacagattccaaacaggtgccaaggatgattcttcaatttccaaattgcttggtttaaaggtaaacgccagtctttagctccctattgaaaacagctccaggcactgtgctttctattgttctagaggggagtcactggaattagaactgcctcagccagcactcttctatctggtgactaccatgggatgctaatgacaaagatgtagtaagtcctctagcactcgttcgcaagagaatgtcttctaggcacccagacatatgatagaatgtgctgaattggtagtctctgtacctgcttcagagtgaagcaggtaacttcagaatgaagtttaaacccaaactccactacttagtagctaggtgaccttgggcaagttccttagtgtctatgtgcctcactttccctttctgtaaaacggagtaataagagtcaatgaatccatatatgtaaagagccaaaacaaggtctggcaaatagagaacaaatctataaatgttcactgttattatttgcactgatgctgatgtaagagaaacatctcagtaaggtatagagaaattcacaaatagagagccttcaattctttaggttgagatataattaatgattcatttctcaagacatttaattttcctcttgttttctgcctgcagcctgcatggttaatgcattttgacacttctcactaaggataaatgacaaatgataaaaccaacaatttttgtccacttattttactcaaagctccgttaagaaaaataatgaaaaaaattttaatttcagtgactaacaggagtgttcgtattgtccctatcattttaaaaattgttttggttactctctattattacagagaataaagactttctgtatcctggagtttaacaactcttattttattttattttatttttgagacagagtcttactctgtcgcccgggctggagtgcagtggcgtaatcttggctcactgcaacctgtgcctcccgggttccaatgattctcctgcctcagcctcccgagtagctggggccacaggcacccaccaccacacctggctaatttttgtatttttagtagaaatggggtttcaccatgttggtcaggctggtctcgaactgccgacctcaggtgatccacacacctcggcttcccaaagtgcagggattacaggcatgagccaccacgcccgaccaacaatgcttattcttaagaaaagaactgccacagaaggaaataggaaaaattcttcttcagtagttgatgcctttcaaaatattaaattactaaacctctacctacctcagtttccagaactctaaaatgaagataacaatactacctgcattacagagctgctaggatttttaaattagaataatgaccagcatggaataagtgctaatacatattatctatggttattttaacataaacatagtctcatggattatttttttgtgctctgaagcaggagaccccaatctttttggcaccagggactgtttttgtggaagacagtttttccacggaccgggggtggggtgggagggtggtttcaggatgattcaagtgcattgtatttattgtgcattttatttccattagtcttacattgtaatatatagtgaaataattatacaagtcaccatcatgtagaatcagtgggagccctgagcttggtttcctgcattagacagtaccactggggggtgatgggaaacaatgacagattatcaggcattcgattctcataaggagcacgcaacctagatccctcgcgtgtgcagttcacaatagggttcatgctcctatgagagtttgatgccaccagtactggtctggggactggggctcttgctctatagcattttgtggtaaataaatctgtggtttccagagcagccttcccagttgtaattaacatcaattggccccactgtgttgaaagcagtgctgcttctcctgcctcccagttttcctacaaaagccactgggattgtagataaaatcctgttttccagttggcgagatgcagagaagcagatgagattttgtctgagcagcggtggatctgagccgactttgattatggctccaccgccaacgcttcctgggcagatgagtcatgcttcctggaactgtctgtcagaggaagtttgcttctgggacttttgcattttgcttagagcttagagataagctattacaattctaagttcagctgctattcaaaaacatgcataaaagctgggaagagtttaccaaacatttcaatttataacttgataccagatatgagtctagcaccgtactaagcatgatacctggattcaaaaaaagtttagaatgaagtatatccattagttagcgaagccagatgctttgtagtgtcgttgagtttagcatgaggcattttagaagaaattttggttttaagattgcctgagtaaaatgtgattttttagttataaaaaattgaaagaagaaatgttatttcagtgtgatcagaatccctttccttaaaaagaaatgctgatcttttctgaccatctttcacaatgaaggattttcgtatgattgcattaatttgcagcagttaatgaaccaacgttccaaccttcaaaagagcctctgctctcagattcaaaagaaactctgcgtgtttcctctcttcaaacatgaaggacagaattaggatgaataataatcaaacctaaaataatttctgaactaccctgaagcagtaaaaattccattagatgctcagaacttgaattgtcctatgcacactgcctttcctggttgacctcaggttgctctgctcctcagactggcgaaaggcagggcaaccgaaaggtctcttccactatcagacaggctcatggtatgaataagcatgcattgagcaaaatgctaaattttaaacactggtaatcacagttgtgggtttcagttaactatattgactttctactttttaaaatgggaaagatttccaattgcaacattacagaattttgtttaaacacgtctttaccctgcagttcctacattggctctttatttatttatttattattttttctttctttctttctttttttttttgagacagagtctcactctgttgcccaggcttgagtgcagtgttgcattctcagttcactgcaacctccgcctcccagattcaagtcattctcctccctcagcctcctgagtagctgggattacatgcgcccaccaccacgcctggcgaatttttgtatttttagtagagacagggtttcgccttgatggccagtgtggtctcgggctcctggcctcacgtgatccacccacttcggcctcccaaagtgctgggattacaggcgtgaaccatcgcacccggcaggctctttatttaatagactttcttttcctgatctcactgtcttcagggagagcccggatggcagtcctctggcttcttccagctcaaaggtctatgatttcacgttgttctatgaaccaggttcttctctgttcctgagaccatctgcagcaggtggtgagaattttaagaggcataataataataataataataataataataataataaatgtttagtgttttactgtagcaggataattggcagagggaaggctgaggtttatggaattaaattttcatgtatacacaggagagtatgcttagctttcaaagcatttcacttaccactagggagggatttaggagcccttgctccatcagtgactatcgaaacatatgtttacatgaaaccgtcagtccctgaacatctgaagacattattatttttaaaatttttaatttttgtgggtaattaataggtgtatatattatggggtacatggtgtgttttgatacaggcgtgcaatgtgtgatagtcacatcatgggaataaagaaataattttttgtaaataattagcctaattaataataaaaatctagttatgataaaaggaagcattataggcaaaatatgattttaaattaatgctggagcagattaccttacatggtaacatttcagtggattaatttttacatataaccttgagatacttaagaaaagattatggagatagacaatttaatatttttagtaggccaggtgtttatttgacagtctaaaagggtatgaaattctgagattggagaagcattactaatgcatatctctactgccatgtcaataggtccccaaagatattgctttaaaaataaatttatcagatcacaaaggaatttatagtcattataggaaattgggaaaatgtagaaaaagctagattaaaaaatcctaaagtatatcattattactaatatttggtggtattgatttcctgtcatcgctccttgtatatttattttattttaatattcgaaggagattattcagtacatactaacccataatgacttttttcacctaacaatagcttgtgactatttccccatgttatttattatgtcattttcaacattgctcatcccatcatcacaatacagccaccaattcctgttgtgaaacacttagaatcttttcaaatcttcaccattagaaacagttctgagataagtatctttgtagttaaatgttttcccacacccatgattggacaatgatttaaaaaataaaaagactcaaattgtggcttctaataggagtaatatatagaaagcagaataaaaatgtaaattctagtaagagcagacagcaactagccaccacatagaaaggaaacgctggtttttatatgagacagacctgtaactcagggtgacaccaagtaactcaaaatgtggtatttcgatgggttttttgctctcatgcaaagcccaacattatgagtaattgttacttttagatgatatttcatatttcctgccccaccctgtcagcacatggcaaggcggctttttctgtgcctatgtcagggagcatgctatgagtggccatgtgccttatggaggggacttagcctcccaagggccatcttggagtcggctgggatcaaccatgctctgcttatcagccttcctctacatttgcctcatttatccaccatgatttgattttgcatttgcccccttgggctttgcttatccacaatggaagcgctgtatctcctctgtgattcttattatttatttatttatttttttttttgagagaatcttgctctgtttcccaggctggagtgcagtggtgcgatctcggctcactgcaagctccacctcctggggttcaagtgattctcctgcctcagtcttccaagtagctgggactacaggcgtacgccaccacacccggctaattttttatatttttagtagagacagggttttgccatgttgcccaggctggtcttgaactcctggcctcaagtgatcacccgcttcggcttccctaagggctgggattacaggcgtgagccaccacaaccagcctctgtgattcttgctttgcaatttctactgttgttacaggaacatttcaaagcccttcaaatttaaagtaacctgaacttggataaagttccaagtttttccaggagatgtgagtgcaaacctcagcaacaacatttttaacaatcaccctaatgaggcctctccacagatcctgctgtggtggttgtttggggtggggaacatctgagcagatgccctgagaattccctaggtcccatccttctggatctccagtgattcagcagcaggaactacagggctgggtaggacccaaaggggaagggaggctgcaacaggaagagatgctgctcacttttagcatgagagccactttgcttgccagtggactctatccacctcaccgtggcagccttaacagcctctggtttcctaactctctttgctgctgtcccctgcatgatctgtcctcccgcaatcccttccacacacacagcatgcttatctccaccccacacaggatgattcgccttggtttctgcatggctgtccgggatgcctcagtctccacaatgcccaagttgtcatagcaacacactgcgaggattggcctccacctcctcactgaattcatcacttccccatctgccctaccagtgacgatttctgtgaactcttttatgtgagtcagctcctgttctctaatccccaacatctttcttttctcatagctattttgggtggtttctctggaaaaaaatgttgattccctttgcctctgacaaagagttagagtaacaatttgagcacattccacatgccaggcctcatagcaaaccttttacgtggtttatctcatttgctgttggcaacaatattatgagataagtaccattatggtgccagatttatagataaagacattttagcttgaagaagttcaataattttcacaaaattgtgttctctaaattttagagctgggctatgaacacagagcctggctctggccacattgacattagtcaagtacattctacaataaaattgctttcctgcttgtgattgaaatataatcttctattagtgacactcacttcaaaatgccactctataaactgattgagtatagttctcaaaaattgaacgatcatcttttcattgagtagaatttttattctatagaaagaataggggattctctactacacccaaaatttctcctcacagcagatgaattatttcaattacatattaagctctaaagaatagaggttttatggaatttgcaaagatttataattggaaatggaccaaattattctccagaagtttctccatgttttaatgatatcatcctaaagaaactcttgagttgctttttctacatgaactatatttaattaattcttaaaattgatctcctataaaaaagaattttcttccagaagaccttccaggaaataaaagaaacaacatttacaaacagtatgaattagatgtcaatctaaaacagaaagggctgagttttaattgtcactcactgtgattctaaaatgagtttggggctgggcatggtggctcgcacttgtaatctcagctctttgggaagccgaggtgggcagattgcttgagcccaggagttcgagaccagcctgggcaacatggcgaaactctgtctctacaaaaaatacaaaaaaagtagctgggcatggtactgcatgcctgtagtttcagccatcaggaggcttaggcaggaggattgcttgagcctgggagggtgaggctacagttaaccttattgcaccactgcactccagcctgtgcaacagagcaagatcctgtctcaaacaaacaaaaaaatagttaagaaaaaaagttaatctctacatcccaagctcatatatataagataattacttgtaattttaatttattacagttttaaatttttagccatgaaacaatttagcaagcaaggcacttgaaagacatatttttgttcttggagatcctgcagttcataaagttgatttctactgaggggacaggtggggtgtctgggtctctgctcacttagaacttgactttcagtgactcctaagtaccctcaatcttacaaaaaaattggatctctatcagtgattgaccacacgtggtgtctttagtgttatatcctcccctttgttatgggtccttcctatttagaagtccacggatcacttcctattgcaactggagtctgaattcactaatggtattgtaaagtatgtgccaaattatcaaacccgcacaaaggaagtagaaactggtaagtatggctaaggcaagagatttccttcctctctgagtgtgtcaagaggagttgagatatttgggggtagggtgggggtggggggacctaagccacgaaaatcctaaatgaataatctctttaagagaataacaaaagatttcacagaggaaggttttgtaatatacacatctccgcatctgaagatatatttaatggccaatttgaaaatgtaagcattattttagtaatttagaaaaatacccctaaacacagttatagaaattagatctgcatattcaaggtgagaatcgcaatctttcttagtttttactagtttcctttctgtaactcaattagaacttcaagtattgttcactctgagtagatcttcaggctctctaaaagcagggccactccagcttgcttgtcagtagttgcaatgagtcacagctggaacgtcctgtggttaacattctgctctgaaaacagaatcagaatcagtgagacggctttccatggtaacctgtatttgtatactttgaaaaatgactgttcctttttgtgtggttttgggtggtcaatttgcgcgggaatgaattgtagaggtgacgttacccatctgtgtgaatataaacaaaaaacctgattttattaacggcaaactttaaaaaacgaggtatgagtttttttttttttccttttcgagacattgttctacacatttattactagattggacattatatttaagcattttcataaatgtctatttgatgcttattttaatgcataattttctccccccaaaggcaaaaagaaactaattgtcattcatcagtgttgccccccaaacctactgcctagcccctccacccccacccagtacttttacaatgtgttattaaagaccactgaacagctgagatccaggggtctccttcaatgcgtaatcccatccagaaggaaggaaaaaaaagaaatctctttaagtcacgtgaaaatgccacatttcttaatcttgcagagctgacaggcaaaaatgctatgctgttcatgaccttgtgcaggattgaaatataattccgcaacatgctgcgacctagtattccgtaagacacatcgagcttagggtgattatagttatggagaaatcttacctatgttttgttggataagggttatgatgacttagcctgggctcagaggcctgacagaaatgaaataatttatgctttggtcactaaattacaatccaaaggttaagatttggggagtgaaagatggtagagcatttgcttgctaattactccactacttgggagcagtatgtttgtttctgtgctaattagtttagaactgtacttcatgccctagaattaagaaaaactctaaagctgagatgaatctcctgcagggaagcagggatttagaagcacaggctgcaaggttggcctctcgccctccggtttctccgcctgcaggagagggtgggactgaacgctaaggtgaaaagcttctgttccgtttcgtttccctcttcattttctgttgctttattcttctcttattctcccctattcattataggggaggcttctgataaatgtgtagaatattagaaacttgataataaatatacacattcaaagcagcagtacgaaaaacagaaaaaaaggaagctacagcagtaagcctgaaaaataaaactcatctttattcatttgcttaaaatgcttaggtttagtgctttggggtgaatgacataataggcttctgagcttgtctttttaaaaatatctgctgaccttccctgaaatctcacaagcacttatgatgagcagccgatttgagaactcagcgagacaggccaaggtttaaaaatctgcgatttatcataaccttaaacaaggccctcacctggttctcccttctacggagtggcacaaagggtccaaatcctttatggtctaagaggagcctgttgaaattgaggattgtatggcactactacctatctaactgtacagagtgcaaataatcgtgcagattgggtcctaagtaaaataaatacagctggcgggggaaatcactgcgttcattcattggagatgcatggggaacctgcctttatcaaagccctgctctgggcagtgaggggaaggccagaggtggtctgtgctttaaggcgactcacaatcagtaggggaggtaagacacacaagcccataacaagaatgcctggggatgtgatcatttccacaaaagaagcacagatgaaaagcaagggctttcaaaggcagactaatttatgcctgactgcagggattaggggcggctccatggaggtgctttgtaacatttggtggtaaagttctccacactcaaatcaatatgtttcaaacaatatttcatgtcataacattttttttcaatgaaaataatttgatcagtctggaattcattgaatccagattatacatttatgcacggacacgtgcaaacacacagacactcacacatactcttaagtagatgtactctccaagggcatcctcgaggaaatccatgagtccattaccaggtattttatgtttcgttgtcatgggcagcttatcccaagggtaactggaacaaagtgtttaaagggaacatgaaggcgattaggtgaaaatgtaatggccttagtcctgaggaagccagtcttgttggattgccattatctttctcaagtgaagagatatagtagagagatttttgtgttttttaatttttatttttcagtttggagatatacagctgataaaatcattaaatgaggtaggttaaggggacacaaccttgcaccctccatttctccttgaagatgtataaatacctcaatggaaaaatggacgaagacatcagtaaacaatttacaagagaagaaatctaaatgcccctaaacatgaaaaaaaaaatccttcaatgtcaaagtaattaaaataacacaagttaagacaattacaaaaaggcagtttttcactgtcagtactagtttaaaacatgatcgtcatcataattgacaaagctccactgaaagaaacacctctgttaactgcttgtgggaggataggttggtataaactttctggtaagaaatttaataatattttataaagagccatatgattatactgtttgttattccctttctaggaatcttttaaaagaaacatttgaagtatcaaacagctatttatatcagcaaaagattggaaatatcttaaatgaaacaacaatagaattataatataaatacattatatttgtggcattttacaccaaggtttacacaattaagtgatatgttcaatgaaaaacaagaaacacaattaaatacatagctcaaatgtataaacacatatatacacctgcacaaataggtatattacacatatatacaaatgaaaaaagtatcaagagaaatttttggatttaatgaaatattaacagtgtttgtctttagtcgaatcaatatttgtattttcctttttcatatatttctaaaatgtctgattattttacaggtagcatttattttaaaaattacctcttgaagggatggctaccccattttctatgatgtgattattatacattgcatgcctgtgtcaaagtatctcatgtaccctataaatatatacacctactatgtacccataaacatttaaaaatatttttaaattatatcttacaattataatagctgctattcattgagcccccctatgtgttgttaatatgtgaatgcctactatttccgtattctgagcctgaattatactttggacttgctaggttgacataaaaccaaaagttactagttgggtttccaaatttattgggcttaggaatcagatccatctctaataccctctctatgcaattatcaatttttaattcttatgttgagttctgtgtactcaacccacctcagcagatttacctctaacttttgaaccaaggaacagcttttgctacttgtgtagacttggatttttccatcccacaaaccatgtgtttttatatgggaaagtttctcttcaatttcagctctatgatggaccacggcagatgggacgctactgtggagtagacctgccccctccagggagtactacaagctccaagcttcaagtgctgctccttacagatggggttggccgccgtgagaaaggatttcagatgcagtggtttgtttacggtaagccaggtgctgatctcagttgtatttgcagttgctatttggccaagaattttttctttttcagttccaaacttagaaacaataccatgaacaaataatggaacccaggtagtaatctcatgcaagggtttaagaaatatacttagatattggtggaacttggagagttaagtctgttaggattaagagaggaagtgacatcaaagtggaaagaatttggttaattgtaggtgtagtaataaattgccttagataaagaaagaagcagaatgaagtttctagggatgaagagttgaacctgggtatagcaagctaactgcaagttggggtgggagtatctcaggtgcaatggaatagaatgagacttaaggctcaccttgacgttaagcagagaaagggtagggatagactagaaagaatgaaagtcagacagggatggggaaaaggaaggggtagggttggcctgagaggaggagaatttgagctgcgatgcacaaagccaggggcatgtgttgtacttgtcaaacaggaaggggcacatctggatcccacctacgaattggtggttcaggaagcaggtagggatcatcattcctctgaagatgaaaggtcttctttaacaagagatctgaaatgtcttcaaatctcaggtgggccaatctgcaagtggagagccccagagcagtggttcccaaaatgtggtccctagagagcagcgtcagcattacctggaacctgttagaaattcaaattcttgggccccatcccaggcctacagaatcacaaactttgaagtggagcccagtaatctgtgtcttaactggtctccctggtgattaaagtttggaaactactgagaggtgaagccggctgagcttctgggtcaggtggggacttggagaacttttctgtctagctaaaggtttgtaaatgcaccaatcagcgctctgtgtctagctaaaggtttgtaaatgcaccaatcagcactctgtaaaaacccaccaatcagcgctctgtgtctagctaaaggtttgtaaatgtaccaatcagcggtctgtaaaaacggaccaatcagtgctctgtaaaatgtatgaatcagtgctctgtaaaatggaccaatcagtgctctgtaaaatggaccaatcagcaggacgtgggcagggccaaataagggaataaaagctggccaccctagccagcagcggcaacccactcgggtccccttccacactgtggaagctttgttctttcactcttcacaatgaatcttgctgctgctcactctttgggtccacactaccttaatgagctgtagcactcactgcgaaggtctgcggcttcattcctgaagtcagcgagaccatgaacccaccggaaggaaaaaactgtggacgcatctgaacatctgaacaaacaaaatccggacacaccatctttaagaactataacactcaccacgagggtccgcagcttcattcttgaagtcagcgagaccaagaacccactggaaggaataaattccggacacattttggtgacccagatgggacaatcaccaagcggtgagtaccactggacccctttcgcttgctattctgtcctatttttccttagaatttgggggctatataccgggcacctcttggccagttaaaagtgactagcatggccgccagactaaagacacgggtgtcaggctttctgggaaacggctctctaacaacccccaactcttcggagttgggagcgttggttggcctggaaccagcttccgcttttcctgtacttctgggctgagctgagggttgacagagaggaaagccattcagctctggggtcccaacaacaagttggttggccctgcagccatgagtaaaactctcaaagtcatgtcacccaagcaagacttgcccatctatcctatctatcctgacccttgcctcctgggtcctaatgcctgtcagacaaatttcctctcgcctctcttctctgaggctagtcccgcttctaaaaaccactccctgtctctgttgcttttctaggttctcctgtaagaatgatttctaatataaactccaggactctgttaccttctttaggcacctgggttcaccaatcagaaagacataatctttgcccaaagccccattgtagggggtactatctggaattttaggatccctcctcagacaagcaggcctatcaatagctattcctgaagctaggatatgggtagcatcagaaattgtatccttcctattcatataagtgaggacaaaaggcatcactcttccaactctggagatcccttcccttcctcaggatatggccctctgcttcatttttggggcataacacctttatacgatgcgggtaaggtcccagtactaacaagagaatgcttaggactctaacaggttttcaagaatgtgtcagtaagggccactaaatccaatttttcttggtcctccttgtggtctaggaggacaggcaagggtgcaggttttggagaatacattgataagggccactaaatctgaccttcctcagtcctccttgtggtctaggaggaaaactagtgtttctgctgctgcgttggtgagtgcaactattctgatcagcagggtccagggactgttgcgggttcttgggcagagggagaaacaaaacaaaccaaaagcacgggcagttttgtctttcagatgggaaacactcaggcatcaacaggctcacccttgaaatgtgtcctaagccattgggaccaatttgacccgcaaaccctgaaaaagaggtggctcatttttttctgcactatggcctggccccaatattctctctctgatggggataaatggccacctgagggaagtataaattacaatactatcctgcagcttggccttttctgtaagagggaaggcaaatggagtgaaataccttatgtccaagctttcttttcattgaaggtgaatacacaactatgcaaagcttgcaatttacatcccacaggaggacctttcagcttacccccatatcctagcctccctatagctccgctccctattaatgataagcctcctctaatctcccccacccagaaggaaataagcaaagaaatctccaagggaccacaaaaacccccgggatattggttatgtacccttcaagctgtaggggaaggagaatttggcccaacccaggtacatgtccccttctccctctctgatttaaagcagatcaacgcagacctggggaagttttcagatgatcctgataggtacatagatgtcctacagggtctagggcaaacctttgatctcacttgaagagatatcttgctattgttagatcaaaccctggcctttaatgaaaagaatgtggctttagctgcagcccaagagtttggagatacctggtgtcttagtgaagtaaatgataggatgacagctgaagaaagggacaaattctctactggtcaaaaagccttccccagtatggatccccactgggacctcgactcagattatggggactggagttgtaaacatccaatgacctgtgctctagaaggactaaggagaattaggaaaaagcccatgaattattcaatgatgtccaccataactcagggaaaggaagaaaatccttctgccttcctcaagtggctatgggaggccttaagaaaatatactcccctgtcacctgactcactcgagggtcaattgatcctaaaagataagtttattacccaatcagctgcagatatcaggagagggctccagaagcgagccctgggtcctgaacaaaatctggaggcattattaaacctggtaacctcggtgttctataatagggatcaagaggaacagacccaaaaggaaaagtgagatcagagaaaggccacagccttagtcatggtcctcagacaaacaaaccttggtggttcagaaaggacaaaaaatggagcaggccaatcacctgggagggcttgttatcagtgtggtttacaaggacactttaaaaaagattgtccagtgagaaacaagccgccccctcgtccatgtccactatgctgaggcaatcactggaaggtgcactgcccctgagtgcagtggttctctgggcaagaagtccccaaccagatgatccaacaacaggactgagggtgcccagggcaagtgccagctcatgttatgacccttattgagccccggttacatttaaccattgagggccaggaaattgacttcctcctggacactggcatggccttctcagtgttaatctcttgtcctggatgactgtcctcaaggttttaccatccaaggaatcctgggacatcctgtaaccaggtatttctcctacctcctcagttgtaattgggagactttgctcttttcacatgccttcttgttatgcctgaaagtcccacacccttattagggaggaatatattagccaaagctggagctattatctacatgaatatggggaacaatttacccatttgttttcccctacttgaggagggaatcaaccctggagtctggacactggaaggacaatttggaagggtaaaaaatgcccacccagtccaaatcaggctaaaagaccccaccacttttccttatcaaaggcaatatccctcaaggcctgaagctcataaaggattacaggatattgttaaacatttaaaagctcaaggcttagtaaggaaatgcagcagtccctgcaacaccccaattctaggagtacaataatcaaaaggtcattggagactagtgcaggatcttggactcatcaatgaggtggtggttcctctatgtccagttgtactgaacccctgtaccctgctctctcaaatgccaagggaggcagattggtttgctgttctggacctcaaggatgccttcttctgtattctcctgcactctgactcccagtttctctttgcctttgaggataccacagaccacacgtcccaacttacatggatagttgtgccccaagggtttagggatagccttcatctgtttgctcaggcactggcccaagatctaggtaacttctcaagtccaggcactctggtccttcaatatgtggatgatttacttttggctacctgtttggaagcctcatcccagcaggcgactctagatctcttgaaatttctagctaatcaagggtacaaggcatctaggtcgaagacccagctttgcctacagcaggccaaatatctaggcctaatcttagccagagggaccagggccctcagcaaggaacgaaagcagcctacactggattatgctcaccctaagacattaaaacagttgtgggggttccttggaatcatcggcttttgctgactgtggatccccagatacaaggagatagccaggcccctctatactctaatcaaggagacccagagggcaaatactcatctagtagaatgggaaccaggggcagaaacagccttcaaaaccttaaagcagaccctagtaaaagctccagctttaagctttcccacaggacaaaacttttctttatacatcacagagagagcaggaatagctcttggggtccttagactcatgggacaaccccacaaccagtggcatacctaagtaagaaaattgatatagtagcaatagtcagaggctatcaaaataatacaaggaaaggatctcactgtctggactactcatgatgtaaatggcatactaggtgccaaaggaagtttatggctatcagacaaccgcctacttagataccaggtgctactccttgagggaccagtgcttcagatacgtacatgcacggccctcaaccctgccacttttctcccagaggatggggaaccaattgagcatgactgccaacaaattatagtccagatttatgcagcctgagatgatcttttacaagtccccttagctaatcctgaccttaacctatatactgatgaaagttcatttgtggaaaatgggatacaaaaggcaggttgtgccatagttagtgatgtaaccatactgaagtaagcctcttcccccagggaccagcaactagttagcagaactagtggcacttactcgagccttagaactgggaaagggaaaaagaataaatgtgtatacagatagcaagtatgcttatctaatcctacatgcccgtgctgcaatatggaaagaaagggagttcctaacctctgggggatcccctattaaataccacaaggaaatcatggagttattgcactcagtgccaaaacccaaggaggtggcagtcttacactgctgaagccatcaaaaaggggaaggagagaggagaacagcagcataagtggctggcagaggcagggaaagaccagcagaaaggaaagaaagagacagaaagtcagacagagagacagagagaggaagagagagacaaagagggagtcagagagaaagagaaagaaagagaaggagacagagagatagaaagtcagagagtgagagagaagaagagacagagagacagagagagaaagagaaagataggaagtcaaaagaaggagacaggaagagacagagagaaagtcagagagagagagaggaagagacagacaaagtcagagaaggaaagagaggaagagacaaaggagtcaaagagagagaaagggatagaagtagtaaagaaaaaacagtgtaccctattcctttaaaagccagggtaaatttaaaacctataatagataattgaaggtcttctctgtaactctgtaacactccaataccaccttgttgtcagtgtaaacaagggcataacctgaaagcactgaggccactgacaacccatagcattcctatcaaacatccttaacccagcaagtttcctaacaggggatctaaatcttaattaccatacaaaggtcccaccagacataggaggagctcccttcaggacaggatatagatggttcctcccaggtgattaaggaaaaagacacaatgggtattcaggaaactcttatggaagcagagttaggaaaattgcccaataattggtctgctcaaatgtgcaagttgttttcactcagccaaatcttaaagtacttacagaatcaggaaggagccatctataccaattctaagttaatatggatggaatgaggttttattaatagcaaagaaaaattaaaatcccaaacttacaaggttttctactaacgtagagtttgctaaaagttaacagtgtaacatgcattatcctactaccacacactctcaaagcatttctcagacagtttgcaagaaataacaaaatctgtccagtaaggatagtaactacaatcccaaatagactcttcggcagcagtgactctccaaaactgctgaggcctagaccctcctcactgctgagaaaggaggactttgcaccttctttgggaaagagtgttgcttttacactaaccagtcagggatagtacgagatgccacgcagcatttacaggaaaaagcttctgatatcagacaatgcctttcaaactcttataccaacctctggagttgggcaatatggcttctcccctttctaggtcccatggcagccatcttgctattacttgccttcgggccctgtatttttaacctccttgtcaaatttgtttcctctagaatcaaggccatcaggctacagatggtcttacaaatggaaccccaaatgagctcaactaacaacttctatcaaggacccctggaccgacccactggccctttcattagcctaaagagttcccctctggaggacactacaacttcagggccccttctttgcccctatccagcgggaagtagctagagtggtcatcacccaattcccagcagcagttggggtgtcctgtttagaggggggattaagaggtgaagccagctgagcttctgggtcaggtggggacttggagaacttttctgtctagctaaaggtttgtaaatgcaccaatcagcgctctgtgtctagctaaaggtttgtaaatgcaccaatcagcactttgtaaaaacacaccaatctgcgctctgtgtctaactaaaggtttgtaaacgcaccgatcagcactctgtaaaaatggaccaatctgcgctctgtaaaatggaccaatcagtgctctgtaaaatggaccaatcagcaggacgtgggcagggccaaataagggaataaaagctggccacccgagctagcagcggcaacctgctcgggtccccttccacgctgtggaagctttgttctctcactcttcacaataaatcttgctgctgctcactctgggttcacactacctttatgagctgtaacactcactgtgaaggtttgcggcttcattcctgaagtcagcaagaccacgaacccaccgggaggaacaaataactccgcactacctttaagggccgtaacactcatggtgaaggtctgcagcttcactcctaaagtcagcgagaccacgaacccactggaaggacgaaactgcggacacatctgaacatctgaacaaactctggacacaccatctttaagaactgtaacactcactgtgagggtccgtggcttcattcttgaaatcagcgagaccaagaacccaccagaaggaataaattccagacacactactgtcttagagtgatctagccctggaacatgtagtgcttgtgggtctcatagcagtagttctcaaccatgatgctagagctcattggtgtatttcaatcaactggaaagagaagtggagttccaagattataccaggaaccaagcatagacatctaagctgtggccctgctgtcaaaatcagggctgagctctagctgagcacacatgaatgtgtgcagtggttgactcttaacattgttcacattctggtgcactcattataggaatgtcagagctacttataactgaatagccctattatacacttaggagtgctaggcgttctgagattataaactgggctctgagtgtatgtctgttaaaatatgtatggggctttcagtatttaaaaatagtcagtggtcatccacagagctacttgcagcttgaaacgtacattaggaattcccaaagtaaatgagttgtgataactaagcttgtagaagttctggaccttcctcttcatcaagtgagtagatatttatatatttatttatttatttatcaagataggatcttgctctgtcatccaaactggagtgcagtgtcctggtcatagctcactggagccttgagctctgaggcttaagtgattctctcacttcagcctcttgagtagctgagactacaggtgtgtaccactgcacctggcatttttttttttttagtagagttgaggtcttgctatgttgcccagtctgatcttgaacttctgagctcaagcagtcctcctgccttggcctcccaaagtgatgggattacaggtgtgagccactgcacctggcccaagtgggtagattcaacctaagtcaactcatggatccgttaaatgcagggattggattgattcatctctataatacagatgatctgtagtattccgtgattctgaaacacatgattctaactagagacagtgtgaaaagagacagaaaggtcaggagaatcctgggaaatggcccagaatttcaagggctggggcattctccagagcatacgtgctacccagatgctcctgtgcacatgaaccctggggatcttgttggatagaggatggggtctggggcaaggcccgtgaatctgcatttctaacaagctcccgggtaatgctgctggtgctgctctatggaccgctctgaggaacaaggtgagagcaagtgttgagactggagaaatgagatggtagaaagacagtatccctagagactggagaatccttctgagatgttgaaagggcacattgtactgtttgttttaatgacagtaggataatagcaagatctaaagcagagagaactttcccccagggacagaagtgtagaaggtaagaaatgttaaccaggaagcctgggctcagggccctggagagtgttctcagtcctagatgcaccattggaattgcctgggagttttaaaaagtgcccatgcctgggttccaatatccagagacaggattcagttggtctgcagtggggccctgactattgctaatttctaaatgctccttaagtgattcatccgtacagtcaggatggagagtttgggagggcagtgattttgctgattactttctcctaagtggctgcttcctctcccctccaggctgttctagccttactagcccaaggccactctaaggagcttgattgaacggtcatggcaggctgtgcccagattactgtatcaatgggctcttccagccaatgtgctgaatattctggtgaaatctctgagttttatgttgggaacatttttttctaccagttctacttggaatctgtcttcctttgggagagtcaaaggcaccctctgtctattctgctttcctgtttactatttcaaaactttctcccagttgctggaaacttggagccagagttatgcaacaaaatgttgccagctgggaccagaaccgaaatataaaattgttttttaactctgtgctgctcacaatatgtaaattatacttgggaggaaacttctggaaaggaatttttagtcatttagatctgtgcaaaattgactatcatattctacaggtatgcaatgccacaggtacacagagttcaatactctgcatctgaagtaggtctttagtttgagataacctgagaaggggagcccacagagagggcgagctcttccatgggagaggtcccgccatttttgatccattggagttaaatgcaagacgtaaatcatgatgtatcattcacgcatttgttcattccacagacactaaggatgtcttttgtgccaggtactgtgctgagacgggggacacagagtgactcagaccagcaggcctggtttctactctacagagctaggctaggtgggagaagcagacatcacgcaaaaacacacttaaataaatagaaaatcaaaaccatgagtagtgccaagcgggcacacacagggcatctgacttgggcccagcaggaggtcagggatgatctccacgcaaatgagacctctgaaccaaaacctaaaaaataagcaggagttaactaggcaagcaggataaggaaaaggattccaggtagaagaaagaccctgtgataggagggagtggggagagcccgagggacctgagaagtcaagaggatggaactgagtcgaagagaaacagcgctgccaaggtggctgcagagctaagcacataatgtggctaagcgcgcacacacacacacacacacacacacacacacacacgagcagggattctgcagccatggggccaaaataaatttaaaaattactctcaatgctcaagacacacacacacaccacacacacacacacacacggggagggactctacagccacaggactaaataaatgtaaaaattactctcagtgctcaagagacacaccacacacacacacacacacacacacacaccacacacgggcagggactctacagccatggggctaaataaatgtaaaaattactctcaatgctcaagtgtaattgtaattttttttttgagacgaggtgtcattctatttcccaggctagagtgcagtggcgcaatctcagctcactgcagcctcagccttttgataaggtgatcctcccacctcatcctcttgagtagctgggactacaggggtgcaccacttcacccagttaacttttgtattttttgtagagatagggtttctctgttttccaggctggtctcaaactcctgagctaagcaatttgcttgcttcggcctctcaaaatgctgggattacaggcatgagccactgagctggtcataacattcttaaatgcatttgtgtgagtgtgtgtaacatatcagaaggaaaataattagaaaggcttctccttgcacagccccgcaagggatgttctcagaatcaggtggagggctcaggacagccccgctaacgctggtcctggagttgctcttcgtgccctggccaggtcaagtggctttaaactcctagcctcttttcctcagaatcctatcaccttgcaatcccttccccctgccccaccctccccactggactcttttctaaactgtgcagtacgatctccaaacaccaagcagagagttcaaacttggcagcgacatcatttcctgagcactgcttctgaggaagagttcctacacacttcattcatttccccagttcatacacaaacgcatttacaaaatatgcttctttgtgaacgacacaaaccttctattggctttaagaaaacggatctacaacgaggctttatctgtgggctctttctgaacatggccatgcagacatgagacaaagtaacattgcagggccttttatgcgggtcctcaaagagggccccaccctggaaataaagaaatggccacagttgccctgtctctaatcggttcatggtattcagccttgacagcattgtccagcggctgaattcagccttggaggcctccatctgggttgcagggggagggggtgggggataggggtggggaatacagaagtttccgcaggctgtgtgaaaagtggcctcccaaccagctgcacagaccccctcgcctcttctggtcgttgctcccagaagccttctttcacttagtgatggaatccagcatacaaacaaggtcaaggagctttgtgagcgagagagtgacatttgcaaagggagcgaacccttcagctgggagcttgcaggagcagggctaaggggcatgtgatcaggaggtgatgtcacccaggatttccacaaaggaaaaagtggccttttctttgggaagatagatgacatcagcctctcaaatgggggctgggtccattttatcttccttttagctattaaggagatttctcaagccttgagaagtttcagaaattagaagagaacattttaaaaaccgtgtcaacatcttttatgactggctcggtttggatgtaagccagtgccttcttgactacctgtgggcatgaggcactgtaccaaagggcttttaaaaaacatctttagagcactggcagaaaaccgccatgaggtcggcagtgtttctcttaaagttagatctttgctccaggtctctttctctcgagtggtctttcattagcctttgtttatcactggtctttcgggggaattccttctcattcaaaaattttattccttttgtgacttagagtacatgtagtacgatttctgggaggttcaccctttaaagacaaaggttttatcttttgtaattctgttatccacttgtcttgtgtgagagaaaatgccttagggtgtgagggtgagtaagctgggctctaggagaagatctgctggacccagcctataatgaacaggcagctacaactgtgaatcatgttaattacatgattatttacatgtcaattacacataacctctgccagcagatattttttgagaagaagtttttcattcattcaaccaaccatccagcacatattttgggcttgttgtctaaatatagagagtattaatttgcttgggctgtcgtaacaaaaatgccacagattgggaggcttaagcagcagaagtgtgctgtctcctggaggctggaagtccaaggtcaaggtgtcggcagggttggtttctcctgaggcctctctccttggcttgcggatgctgccttttccctgtgtcctcacatggtgttttctctgtgtgtgttcatcctgatagctctgtgtgtccaaatttgctccttataaggacaccagtcagattggattacagtccattcagcttcattttaacttaattgcctctttttaaaggccctatccccgaggacagtcacattctgaggtctgggagttagaacttcaacatatgaattttggcagagatacaattcagcccataccagaaaggaaggagatcacattcttgactttggggagttagtcatagagtaggcaaggcaggtaaaccaagtgtagaaatatatacataatccaggacgccatgggaacacagaaaaaaatagctaggacagcctgcggaagttcaaagagacctccaggcagctttgacatttgaactgagttttaaagaatgggcaagaattgatcagacaaatatctgggagaggaaggcttttctaagtagaagcagcaaggtgtgagggcacaaaagttttgcaaagagcaagtccttcagctagaccacacattctctgcattctccattggggcagtatcaactccaaggaggtaaaattggctcttggtagggggattaagaaattcttactctttaatgtataaagcataaagatatacagtacataacagatatgcaatatacttgtggtattaaattttcatggttgagaatttggaaaaaaatgtccgaacaatctccttagggggctgataatgaacaaaaggtgagaaacactagggaaagggagtgatagaagttgacgcaggacacgttatcagaaaccaactgataggaaacatcacaagaatttggattttatcctgccatcagggaaagaccaccaatggatttttaagtgggaaatttagtgatgcaaacagaagtacactttagaataagagttctggcaagtagagggatgcccaagaagaggaagagactgagagtttggtgactagtcagagcagggagaaaggaaatgagtagtgggtgaggcagcgtattaaagagctgtttagggctgggtgcagtggctcacacctataatcccagcacttcgggaggccaaggcaggtggaccatgaggtcaggagtttgagactggcctggcccaccccatctctactaaaaattcaaaaattagccagctgtggtggtgcgtgcctgtaatcctagctactcaggaggctgaggcaggagaatagcttgaaactgggaggcagaggttgcagtgagccaagatggcaccactgcgctccagcctgggcaatagagtgagattctgctaaaaaaaaaaaaaaagagctatttagaaggtaggatgggcagatctgatggtggagtagatgtgtgtcaatctgggagacagaagaaggaatcatggatagctcccgttttcctgcggtgtatgatttggtgcatggtggtgccattattcatagataggaaatcccagataaagaccatgtttgggggaaaattgtgagcttctatttgaacatgctgaatttgagatgttcaggggatgtatcctttcagcaattgctggtgtcagtataaaaattaggtgaggttttgggccagagaaagagactttggaataaactacatgttggtgaatttggagttgtgagcatgatgaaatatatatccaaaactgtgcaaggtatttttaggcatatgaaagaaataccacgttagtctttgtcttcaagctgagcatgatcagttaggaagcaggtgtagaaaactaacagaagtgctgaactgtgaggtgcctattgcaaggctagtaaggaggctggaagtcattggggaaaatcttcacggactctgtgagattttagagcccttgaagaatgatcaggacaagaaatgacagatggtgcctggataagcatgagccaagaaagagagagaaacaagcctgatgtaatgaagacagtgggatatgaggcttcgtagacctcctgggctagattctttagaattctcaaagccagctagactagtgtgaacttaacgtagtaaggaaaagggaaccactgttgttttagacaatggagtgggaaatgtcaagggaggagattacaactggagacatcatagatcacagtgacagaggcaaccccaggggaccattctgggtcctggttactaagagcgaggaatagcggtctgcagagacaagacaactgatgatccaaggtgagtaacattctgatgaatcctcagcaaagacactcaagggctatgtggccagtgctgtgataaatcctggcacagaaaatattagatcaattgccgcattctctcttcctaataatttcttcaaagttataactttgaaatacagactcatgattacctaagttttccagtttgaaaatgattttagggctcttttttgttattgaacaaaaaacttttgttgaacgaaaaaattttattgaacaaaaaatgttcaatttaaaatttttattattgtgtgtccttgctgccacgtggtgaaaaaattcacaacaatctggaagtatgatgttggcaatgaaagtgatttatgaattgtggtcagcaaagattctagcgcaggttcacagggctgggctgtgaatcacactgtctggttctaatctcaggcgcagaccttctctccgttggtaatggaattgctttcacagtgtcgcttcctgctaggctgtgatagacataatgtcacacagagagaaatggtaaagcacccatccatccgcctccaaagtaacctcaagaatttgatgtcagataaggaaatcctgcttggttttggtagaaatttaagtaaaagagaagcttttaaaaacaactagctctgtttaagttaagagatatttccctaaatgctgactattctttctctcacatttatacatgctatatcccatcctgtttatgatggctttttcagcctatttgatattttgggcttttgtctttgtgatactcttaaaatatttttaagcatggagactggaaatgagttccttcttagtgtggaaccaaagcacaggtttctgcatcgtgatactgagtctgatttgtatttatgacaaattttcacttatatcttttctgcaaagaaattcttaatggacgatgctcatttctaagaaatctgtttctaaataactccttgttgtaaagttgggatagtgactaagaaaatcccacagctcttttggccttgacttcagagtttctccagcaaggtcccaatgatcagaggcagcattaaagctgtgcatatgcagacctttcagaatgagtggaaaagctcactcctgacatttctgcctccttgacgacagcagtaaatacacatccacacagttgaccttcatctcatgttggctctgagtctcttcaccagcaagggcctctcaggagtctcgcctccccattcccatgtcgccactgtttgaaaaagttggagttctatttctattgccactctttgaaacagttataaaaagaaaaaaaaataaccctcaaaccaccatgaccttcccaaatcacagattgcacaatttgtaataacagtccttgagatctgggccaaagaaagggctttctcgaaacttctgtttgtgttctggttccctggcaacaatatccccaatagaggaatgcatgtactttgcaggggattccacactttttcgtatgacacaaaaaccaaaaccacacttttttttttcagtttcaaatatcatagcagccaaaaatgaagtgtagaaacttgagttctaagccaactcagaacaaatgtgacgttcagcgtagaacctgaatttttgtccccagaggtttctcttttcgaccattgacttaaatgttgccatatttgtttcaaacattacatatccaaggacttgttttgtgtgaatgcactgtgtactcagaggaacagaggaagcagtgccaggtggcagcagcattgtctcacaaacagaacaaatctggtggaggacagtaactaccacttataagagttagtagaatttgataatctgtagatcagtaatgacaataatatactctgtccctgatttttttctcctcctagttccacaggctactcaaatatagactattttgaccctgtgtaccaaaataatgaaattgaaggaatgcaggataaataatatagattttaccacctaaatgtaatcttaaatttgtctgaagatattatgataaaaataaactatcttgccatgtaaagagtgaatgaaaatatgattaaacgcttagtgcattggtttaattgacatctcattcactattactgttgttgatgttatcattttaaaacatgactcaacatgtgtaatttaaaaatatgatcttgagaagtgaagccagctggacttcctgggtccagtggggactcggagaacttttctgtctagcttgaagcattgtaaatgcgccagtcggcgctctgtggctagctaaaagtttgtaaatgcaccaatcagcactctgtaaaaacagaccaatcagcaccctgtaaaacggaccaatcagcactctgtaaagtggaccaaccagcgctctgtaaaatggaccaatcagcaggatgtgggcggggccaaataagggaataaaagctggcctcctgcgcaccagtggcaatccactggggttgccctgcacgctgtggaagctttgttcttttgctcttcacaataaatcttgctgctgctcactctttgggtccgcactacgtttatgagctgtaacactcactccaaaggtctccaccttcactcctgaagccagcgagaccagaaacccaccgggaagaatgaacaactctgcacacaccacctttaagagctgtaacactcactgtgaaggtctgcagcttgacacctgaagtcagcaagatcacgaacgcaccagaaggaagaaactccggacacatctgaacatttgaaggagcaaactccggacacaccatctttaagaactgtaacactcactgttcaggtccgtggcttcattcttgaagtcagcgagaccaagaacccaccggaagaaaccaattccgaacacaatctcatgtctcatcccaataattttcttaaatgagcattatcattcccttattatggatgagaaaactgaggaagaagcctgagacaagttaagtgatgtgtccaaacttacacatccactaagcaatggaatcagaacacaaaactcagtgtgtgatgtcaaactcaaaggccgtgcaataagtagcacgatggtgcctgaaagcaaatattttttccccacagcttttcattgcaaaaaaaggtcaaatgatattgcaatgcaaagaaggtcagagcttatagtaggtaattttataaattcccgtaataataaatgtttttaaaaagatgtgtgcaatcttacccaagtaaatggtgatccagtttcaaaggcttcccactaagtgacacaattcattctttctttaggttcaagtagcaataatatgtgggttggggcggaggggcgcattgctaggcaaaagacaagttcgaaatagctgatgttatttgcaatccttaaacacaatttctgctttattactcatttataaagtgctgttctggagctgctatatatgttgctgatggaatccaccgatctgggagaaaccacggagatcatctggtcagttgccaaggtttagttatacaaactcgcttacaagagggagaagttatattaaagtgaagagtaaaagggtagctgctcccagaacaacttggccgggctagagtggaccatgggaatggggtggagcatgtgaggatttgggtaatttagttgtttttcttcccctaagctaaggacccaggctggctggatgcaggatttgccctgcgaggggcctgcagcatgggatgttgtaatcagagaaaacaaccttgaggctcagatttggacagagtttaaagggtcacagaacaccactgccatggacgtggtgctgcccacctgtgtccatttctccgggtggagtcctctccctgcagagggaaggttagaggttggaggaggtgagggaaggaatcagggagaggcctgcaatgtaggtccctggaggctctttgagcttttccctgcaagagccctgtgtaccaaaataatgaaattgaaggaatgcaggtttgaataatatttctaaatagaagtatgactgttgaacttggaaactgcctacagagaacatgttttctctgtctttgtttgtttgagggatttcataaagaagctttcagtagccttaggcatgactgcttatttcagggaaggttagtacagttatcttagtctcatttctttccttgtacctttttatactaaactttgtttagaagtcttcaatcatttcaaaaacatccaaggagagggaaaagagattgatcaaatgattgatttctcctgaagaattgtaagcaagggatttctactgggaaaccattttttaatttgattgaaattagtagcttaaaaggaaactgataaagttaatcaaagtgaaaagatgacaagattggctaacttctctaggttaagacgaaagatagtatccttttgtatacaggaaattaaaatttatattacacagaaactccaaaattatggcttctttggatttctttctctttgatgatgtactaaagggaaacacatcagtatttagatctaggccatcttagatagtcagatggctatgacagtcttaactttgagtatttatatgacatcttgaataggaatgtaaaggtcattatatagcggtccacagcattgatttctaagcttcttgtatctgttttccaagtcactgacttcatgcaataacttattctttcactgttttttattgtatctctaccattgaaacccgatgctctactttatatccactgctgtatagaaattagtcgaataaaatggattatcacaaaatatggggcaaggatgaagtctccatggaacatgaaactttctaaacgttcattgactctccaacactaaaaatcgttatgacttaactccctggttcttgggtttacctgtttcttcctgatgtgatacctggccctgtatttgctgctagttttctcaacaatagaccttttctgttttcatgaaaatcttacccttgaccaaccatcctctaaacctcaagatgacaaataggaagtaataattacaagatggaatacagaaagtttacaaatgtgcactccttgaataccacacaaatagttgttaccattttgtacctacctgggagtttggccacctcaattatcagggaaagaatgaggatacattagcttcttagggctactgtaactaagtaccacaaactgggtggcatgggacaacagaaatttgttctctttattctggaggctggaattccaaagtcaaggtgttggcagggtcatccctctgacggctctagggaagacccttccttgctgcttctagcttctgttgattgatggctgtctttggctttctaagccttgtagatgcataactccaatttctgcctctatccacacatgaccttcttccttcttggtgtctgggaccaaatttccctcttcgtataaggataccaagaatattggatttcagttccaccccaatccagtatgatctcattttaacttgactgcatctgccaaggccctttcctccaaaaaggtcacagtcacaggttcctggtaggcataagtctcgggggacagtgttcaacccaatacagggacaactctctcctctcctggagtcacgatgttttgtcctcttcttccttttcactctcttctttcttccttcttttttctcaaggaaattttatgttccttggcctttatattacttgattttcttctttgatttcatctcgtgatcactccagtttgtgtccccttcctcacagaatacatgctatctgactaaatccctcagaaaaatccatctgcacatgcttcatgtccttatgaatttgaggagctccacccttggccttgtgttcagagaggactagtgaccctagtaggacagatgcctatcacttggccacatacctgtgaaatgttggggaattaactggtaacatcaaaccaggaattactgactttttgtggttctcattacatgccagtcacctttggacaactttggccattttaaggagcacatattcctgtccacttccccaccctccctgacctgaaagtttctgttcaaaatccttgtaattacgtttttttatgtttcatagatgtatcggaagtgaggcctgtatactcactccaggaaatagttcactttgccttgggttgggccttccccagattctgagctcttagttaccaattcacatcacacctgccttaccaaaagggtccttgctggcagtttctcttctgtgtcctcccttcctccacaagctgcctttttttttttttttttagatggagtctcactctgttgccaggctggagtgcagtggtgtgatctcagctcactgcaacctccacttcttgggttcaagtgattctcctgcctcagcctcctgagtagctgggactacaggtgcctgccaccacgcccagctaattttttatatttttaatagagacagggtttcaccatgtttgccaggatggtctcgatctccagaccttgtgatcggcctgcctttgcctccctaagtgctgggattacaggcatgagccactgcgcccagcccacaagccgcctttttacacaatgaaggcaaactggccttgccaatgaagcacatctcaaggtcttatagagcagaaagagtttttattgttaagttatagaaaaaaagctattaaaatataaattgagcattttaatgaagcacgtgaacatcctcactaattacttttaaaatttaattctctttcactgtgccttggcttttggcttcgttttaacagcaactgttgatttcccaggcatttcctttaggaatgaagggataagggtgggagggtgtcggtgatgaatcacttctctcttccttttctgccatcctctttgggctttagccatgtgtatttcaagatgttattcctcctgatgccatcagtttatggcatatagtttcaggaaaatgccagccagcaaagcgctgactgcatttgagcagtcgccgggcaatacagcagttactttttaaattttgtgccttggattccatttagctgtttcattactggtttgcttttattaaagctcttattaaaaacacacagatacgaacttaaagatagtacctacataggagattattattaaatgtttcagtactggaattttataactcatggcttgttttggacaaaaaccaaaacaatattagtgaagttcttttatgaaggtattttaagttatctacacaagtaagcaggtttagcaacagcttgtaactcttggttgttatgagttcagcagatcaatgtgcttcctgcagataaagcaagcacttcctttcggcagatgagtgagagtttggaggaaaatcaaggcaaacagatgatcagtcaccagctctaaaacttttataaagattaactctttaaaactgaaaaacataggcttctcttcagggcattattttattccagttcagctgatgtctaatgatgtattctgttagattttgcctcaaagtcaattaaaagatttttgctttgtttacgttttccaggttgctatggtgattgtcttcagtggagggacaggacagtaatgagggcagcattcaacattgttagttccgtgcctttgagctgaagttctcggcaaggcatgggggagagagaacacagaagtggaggtcaggatcggggagggtgggtgtcacaatagggttttgtacccacatctgccattcactaagtgatatgagcatgttccacagctttcttgaacctcactttgctcacctctacaatgggcctgacatcattgttacctgcctcccgttgtcatgattaatttcaaataaaataatgcatttcaaataaaaataattcaaataaaataaaagcacttgagaactgaactaccataaaaatatggattgtcttttaaaaaatttttgtgcaccttaatgaaaaaccaatttcttacctcttctctagctattcatgatagctttttaaccagtaattcctcttctagctccaagtctttgtctcaaatctggggataaagtcttgtgaggatacaaaacacggccaggtgtggtggctcatacctgtaatcccagcactttgggagggaaaggtggatcacttgagcctaggagttcaagaccagcctgggcaatatagcaagatcctgtttcaaaagaaaagagtaaaaaaaaaatgtaaagatagaatacacagcatgtgtgaaaggattatgatatgcacaacatttagctaaaaactttggattgtttcattcattctatgtaacaaccctatgaagtaagtattcatacagctatagatgaaagaaaggttagattacttacctaggaactatcacagccagtttaggaacccatttgtctgaactacagcccatgcttcctctgttacactataatgtttccaaaagttttgcaatctaacatgccaattaagcagttctaaaatcgtgtctactccatgaaaactttctcttaccaaagtgacaaagagccactgtgtctatttctctcaaaactctttattcctcatgtcactgttcctttcttggttggtattttcatctttttcatttttgagacggggtcttgctctgtcgcccaggctggagagcagtgctgtgatctcggctcaatgcgacttccacctcctgggttcaagcaattctcctgcctcagtctcctgaatagttgagattacaggcgcataccaccacgcccagctaatttttgcatttttagtagagacagggtttcaccatgttgggacaggctggtctcgaactcatgacctcaggtgatctgcccaccttggtctcctaaagtgttgggattacaggtgtgaactaccacgcctggctggtattttcatcttttaaattatcttcttttatcttcttttgaaaggcttttctaaatcattgtcatctattttagattatgaatgaccggtgttaaaaacttctgtatttcttttacattttattgttcattcaaccagacaggtaaccggatgacgacaaggatgttggtggtctaaacatccctgcctgtgttatttcctgatgggtattggtttatataacttctttcctctccagacttgtgtattctccatctctttttcccttccctgtttgttatccctttgtcatgcatccagagtcgcaaatatgactggtaatggcaggatgagttatttattcttatttgtaacttaccagtgattaacatgtaaaggatagaatagtattcaggttgttttcttcaaataaaaacttattgaaattactcttagtaaactgaaggagaagcaaaaagggtttaataacttgcaagaagacatgtgggcaataacactttttatgtctataaatgtctttctttttttcaagagatattaaatatgcttggcttctatagcactgcttgtattatgggcagatgctcaataaacacttatgagtgaatgaaggaataaataaatggaattgggaagctattttacctctttcaaattttagaaatacgaagacagttaagtttctaccgtaattaccagaattacaacgtgcaggtttgttacatatgtatgcatatgccatgttggtgtgctgcaccctcctagtactgtataattttgaccagaaagtaccactaaattaatctatcctattttgcatttgctgtgaacttttaattcaaatgtttccttttgatatgttaatcctcagaggtagtgagagcatgaaggagaaaaagaaaacttcagagatttcaagccctaactgtttctttccctctttctcatgatcatacaatatttttcctgacagagtatcacttataaaattgaaatttctcagctgggcatggtggctcacacctgtaatcccagcactttgggaggccaaggcgggtggatcacctaaggtcaggagttcgagacaagcctggccaacatggtgatgaaaccccatctctactaaaaaaaaaaaaagaaaagaaaaagaaatttttctttaagaagcatacatatatgtgctattaacaagatatacttaaaagtaaaattttgctctttttattaaagaaaaccttgtggattatttgctttaaatactaggaaaaaagacattgtgggtccatataactatactgtaatttttttaaagcaatactgaatgccccgaatctgtattaccattccagtttacagcgacaatttaagggtattagtatcctgttatttgcgaaggaattcacaaggaaatgtaaaacaattggaaaagacaatggaaaaatgttacacagagttttatgtgaatcaactaagataaaaaaattgaatcagattggctgatgaacgaatgctaaataaaaatgcagaaatgagctatctaaactttcatttccttcttatcttttatatcatgtggccataaagttattttcctctagattttttccattggataatttatttgatactactgatagaaagaaccatctgagctgaaaatgcaagttgagaaaaaaatttcagtaacaggctttgcttacctgtaatgtattttagtaaaaggtggtacatcttaacacgagttacatgaggcactgtgttgtaccactccggaagcatcctgttatagaatgtcctgtgagcggtgctccctggagttgggcattggtacaggagatacggacaatctgtgatgattttggcttcaggaatatttgccatgtgttgttgtagtcggacaaatattttctcatcttttacggtacttgtgtttttttaagattcatcatagtctctaaacaatgtcagcacatctaattttaaacagctttttcgtaggctttagaaataaaagccggaactttttaggacacaggaaagatattgctctgtgcaatacatttaaagtctgaaaacgcagaggttttcaagtgaaaggagactgagaagtcaagaagatagtagtgctttgagctagagtcagatttctctgccgaatcaagattcttagaattctcagtgcttctcagtgcagtggggaattctgcacggagattttttttttaactccttaacttttaaaagcttttcttctaactcactgtacaggaggaatttgcatagagtggacagtagacaagatctcagacttggtgtcttactttagaagccatggtagtttaatgttatgtgaaaaatgcacgtttactcataatggagtgaggaggcactgttacttttattttattttttattattatactttaagttctagggtacatgtgcacaatgtgcaggtttgtcacatatgtatgcatgtgccatgttggtgtgctgcacccattaactcgtcatttacattaggtattcctcctaatgctatccctccccccttcccccaccccatgacagaccttggtgtgtgatgttccccaccctgtgtccaagtgttctcattgttgaattcccacctatgagtgagaacatgtggtgtttggttttctgtccttgtgacagtttgctcagaatgatggtttccagcttcatccatgtccctaaaaaggatatgaactcatcattttttatggctgcatagtattccatggtgtatatgtgccacattttcttaatccagtctatcattgttggacatttgggttggttccaagtctttgctcttgtgaatagtgccggaataaacatacatgtgcatgtgtctttatagcagcatgatttatattcctttgggtatatacccagtaatgggatggctgggtcaaatggtatttgtagttctagatccctgaggaattgccacactgacttccacaatggttgaactagtttacagtcccaccaacagtgtaaaagtgttcctatttctccacatcctctccagcacttgttgtttcctgactttttgatgatcgcacataaaaagccttgatgaagaataagagaaggtaattggaagaatttaccaaccaataaagaatatttaaaaaaaaaaaaaaacagaaaaagaggcccagaaatgttaagagcaaaaaatgttttgttaatcaccaaaaattgctgttggaaaacaagataatttcttttctaattgtgtctctcataagccttcctcaaattttacctcttctgcaaagttttctcttcctctccatactgaaatctctgtctgaattcctgcaaacgatttgagagcctgtgcggtatagtaatgaagtattaagatacaaccagatcacctcagttagtatcctagcatcaattaaccttggaaaatccacaccacctctgtttgcactgatttgctcatttaagaattggatcctaacagtacctacctcatgtggtccttatgagtacggaaacagaaaacacatggaaagcccatatgaggactcaatgaaaggtggcattattctactgtgtgccgcaggctacagcatttgattatttgttgtcatggtctgcctgaatggctttctaaggcatgacatatcaagattctgaaacacatgctgttgtctttttccttggttggatttttctatatccattgtattttttttaatgtaaatttgctgagttaggaactatataatttacttgtttatttcttacagtctttggtacaaagctaaggatttttagcccttaaaattctagttcttagatctgcacgggactgcagaataatgtattagctacaaggacactgaaggcccagggacctgaagttcacgaccacggctcacacggtccattgtacttccgactatgttatgtaattcttaccttattataataaagaaaatctaaaattagaatgacttttttttaaagtacgaaggtttgatatggtaagaaaaaggatcgagcattattgtactaaattatatataatccagtgtttttgaaaggataaacttaataagttgtagccatgatttttttctcattgttttataactgcataattataactttattgtaacttaacggttttctcctaaattaagcattgtatatttttgatggcctttcggtgagttgaatttggaattattttccatgtgctgttgcccactttgaactgactgaacctttctgttttaacaggttgtggtggagagctgtctggggccacaggctccttcagcagccccgggttccccaacaggtatccaccaaacaaggagtgtatctggtacattaggacggaccccgggagtagcattcagctcaccatccatgacttcgatgtggagtatcattcaaggtgcaactttgatgtcttggaggtaggaagtgagatggttttttcagcacattccaaagtttggggtagaacaggaaatcactctgccaagattccgaattctttccagtagtcagcagtgttctattcttagacattttaatgagcatcagcccttcggtgatcatttggtagacatgggattaatgtgtggtttgggttttcctgaagcaatgcctgagggccttgcagcagctgagttaggaggtaatgccaggaagccggagcccaggacgagtgagtgaaggaaaggaggagggggaaccagcagagggagcccctgggggcaacttgggctccatccgctgggaccttctgaaggaccacagtggaggcactggtccgccaactctggttcccattggtaaggactgcacttgggatggctaacacctcacacttgcagtctgagaaagctcccccagaaagagcattcgtgtggcggagcatagagactgggcactgccaacaagcacagggatggcctaccagggctgccgctgctcttcaaggggccgccagggccatctgccgcagagcgcttttgtaaaaaaatggccacctaggtagcatgaggcatttgaagatgaaaattttcccagcacttctgcgaagggtgtgtcttggatcattaaaacagtctttgagaatcttgagcccaaaagtttattataatcaatgtttaattgcaggaatttagtcattagaatatgtgtgtgtgtgtgtatatatatatattttaaatatatagctttaaaatattttgttgtagtttataaaattatataattcattataattatataacgtactatatagttacattatttatgtaatattcttatataattttataacatatatagatatgtcccagatatatgtaatatattatgtagtatattatatacttacactataaattataataattaataattacaataattaatatttattataacagattattatattatatattttaatgtaagtatataatacactacatattatgtaatatgttatatatagttacatgtatgtaacacatttattatgtatactttgaactttgacctgtctgcaaactttaatatcttccaaatacacacaaaaatcctgtgacctcagctctagggactgctgtagcacagcatgacaaggattctatatccagtagaacctaaattccatgaggctagatgtttgtttgctttgttttactgctatattcccagctccacagagtacctggcaaagagtaaacactcaatagatgtttgtggaatgaatgaaagcatcaacgtctctgattgtcacaccataataatgcacatttagggcactgtacagaggaatttttacctccatgttctcatttaaacattaaatcgttccatgaggtaagaggggaattttattcccattttacagtggtcaaaactaacgctcaaaaagattaatgggcttttccatgaccacatggaaggggagtggaagagctaataactgaagccagtcactgctcaacactccagtaaatcctgagaccatagatgggtgcagggtgcaaggggtcgatatgaatagtatggacgttacaggaaactttaacaaaaactttaattataaaacaagttcttaccttgaaaagaaatggaattatcccctcagtgagagtcactaggaattacttttagtaattcatcacttttagtaatttagtaaagtcatccttctcagtgagagtcacaaggaattacttttagtggctctaaaagacttaccatttctatctctgatttcatttactgtagctctacagacaatttactattgtaattgtaaatgaaatcagatagaactggaaagtcttcacggaaggactgttgccaagtcatgactccatctcagaggagaaacaaggtgcctcctgaaattcacactcacagcacaaagtaggactagcatccatgtgcagaatgttcagatggcctcgctcgcctgcaaggatattgcttggttgcataagaccccttatcacttacaaagggctggaggtggatcttccacagctatgtgcaatgttccaaaccctttattttcatactccaaagtgcatgtgattgttgcccacttggcaaattataaatgggccaattgtgtttcgggttgtgtcatacccattacgggagaaagtagagacaggggctgttccctacaagcaggcctggggcctcagggacgaaatcagggactccaggcagaagcggctttcaaggagagccctatgcctgacagaaatggctgtgagaagacgcacagtctgcttggggcttatttttattatgacaagctgacattgcagtggcctcccgtgttccaccaaaagcagggtttgggggactgttctgaggctcttaaatatttggggaaagtttttttctgaaagctaaaaggagcaaccctctgacattttgttcaaaagccttgttttgcttttctgcaaatgttcatttggaaaacgctgtaataaaattgggctaatggtggtggaatggtttttttcacccctccctagctgctgataacatgttagtagtgggtttaaaagtttgttacccatgatgggcatgtgatctaaaaactttgctgactttctcagcctgcatgtgagtgtagtcaagtggggccttacagccactaagtattgggcttacctgggtttcacaaaatttattcagaagccatttttcccttgaaaaatcagagtccggaaagtggcccattgcaaaaagcagcagctgtttggttactcataaccccggaatgctgacttgattgtaacaataaatggagctaacagagcagaaagaaatgttcaaaacagattaaaaccataggctttgaaatgtcctccatcctgagcatttgctaaaacacatttttaaatctctgatcatcagaccacttctttttcccccaaagtttagtcatatgctgtagttgaatgaaccatgccctgaaattctttccatctttttcttcttttgaagagtcatgtactatcggttttatttgtggaagccagaaggaccattgtttcggtcatggaaacactctgcctgattttactttaatctctgagaaagtctttagagagattctgaactggcattaggcagaaaaggaaatccactccttggagcagtaaaccaggacaattgcttggtgtggacagttacctcagtctggcctctctgcgataggcttttgtgagctcagccttgcaagaagggaagtaaataatgtccaaagtggcagtgtttattcttctagaggcttctgggtccagccaactcatacccattatgtttgtgatctcaaggggatgtttgagcagagaaaacaaagaatattttgccgacgtgcgagttttctttgttagaacttaacacttggcgttcagtggtctttccaaatatgtgctgttgattgggcttgggtgattgggagcacatgctgtcagtttcatgctgtggggactgtgccctaggcgagggggtagggagatcttgaaaatgggaaagaaagctggctctacacaccatgcaagcttgcttctgccatttgcatatgtgtacgtgtcaggggccacacagggctcttcctaaagccctgcttttgatgggacttggggggagtgcacaaacatcagctcctcctaataaaaataagcctgaagcagtcggtatgcttcattcctttgcaattactgtccttgtgctcagccctctgtgtaacagccgtttcattcattttggcctttaccggatggctggggggaattaatcagacaaagaaatcattatagattcaaatcacacactcctccccaaagtaggcttcttgttctcactccctctccccagagaacacttgagtgattttcctatcagtcagcagtgggtcctgagggtgggcaagggccgggggtgctgaggaatgggggcagagtgtcccgaggtgggggaaaggcacagagggagggtgggagggcgctgtgcccagatccccctgagagccgccttcctggctctggtcctgagtgcctgtacatggatggctgcagttgcagttatgaaggtctcagataccaactctttgaaaactgtctcccaaagatggtctttcttttacaaatcgaagtttgaaaagacctgaagatgaggagtcagcatcttctatttgattcccatcctgccttcgccaccctccccagccccacacatacacacaggagataaacaggacccagaggagactgagaaacctgtctgtgaggcctcctggaggcctggcctaggctatccttgcctgcaagatgccctccgtgagcccaaggagactctttccagaggactatgtcactggggtattggattccagtcagacagacagtttgggagatttggaggagcctacgtggtctgaagtcatgtgtgatagatctagaagtgaaacaagagagttccctgaccaccccgtcgcaggacctgtgacaggggtgtggcacatctgttcggctgtggtgccctcaaaccccttatgggagggggagcatgcagattggcaggtgcaggaacccaggcaagatgctacccacagtacggtctagtggtgggtgcctgtgactctcaaagccctcatgggcaggctacagtattcttttagctctgccatccacagagggctcaagtgttaaccagctcagtgactcttggtacccgacttcctgtctggcatccaggaagaatcaggtcacacacggacttgaaggatggtgaatgtggggattttattgggcgatggaggtagctgtcattggaatggatggggaactggaaaggggatggagtgtgaagatgatcttccccatagagtttcgctgtgctgtggatgatcaactgtctgaccatccccggccaaactcctctcaacgttcagatgctccttctctctccttctctgccacgttgttcttctcctcctctgctcttctattcatctgcccatctgctcgtggagcctggagttggaggtttatatgggtacaggagatggggacgtggcaggccaaaaggcaacatctgggtgtggaaacaagaatgcctgttcccgtttagggccgtgggtttccaggcttggggatggggcctttgccagggaacctccctcttctacccagtgtttccctgtctgctgtctatatcagaaggagccatctggagactaaggcagagtctagggcaatccctgagcagaaaagtgggatgcacttagtcaggttcctgggcatgggcgtgctgggagcaggcacagggagggtgcatagcatccccttccttaggctccaaaacacacccagagagctggtatttccactcctcctaaagaagcatacgtgttatattcaatgtgtggtcttagaaaacattcagtttgcagggtaggtggaaattcctaaaaatataactgggatattggtagccttcagtgaactcaactttcataacaaaatggctttatgctaagactaatcatatgtgccagagttagaaaatcagacatttctttttttaaaggtccccctaaaattcagaaaatcgacttaatattgtatgatctgtaatgtttctgctagagaaagcaggaaagcccacaaagacatgaaaaagacaaaaagaggagatagggaagattctggaataatctactccgtcctcctctgcaattctggctgatgaaacaagcaggcattttatgggtgattgaacttgtgtgttcctaaggcacagggagtgcctttgaaaactcagctcaagtttatagtgcatccccacccagggaggctgagatttcaatctctaataatcatagaacccaaggagccgggggtcaaaatgagccagagcaagggcctgtaattgcttaaaatattttttaaagtcttttttcctacatcccatgttagatctatggaggccccgatttccactctcccagaatagcccaactgtgtacccagagatcacctgagaaccccatgcaggtctccagcactggaaatgagctagcaattcgattcaagaccgacttgtccataaatgggagaggcttcaatgcgtcatggcaagcagtcactggaggtgagtgagaaaaggaggtttcctaaagtacttaagccgagccctcgttaaatttcatgaaatgcttgggaaaacgtatgaaggctacacacttataacttagtgacatcccaaagggcagcctactgagacctgacatatacccttccctaaaatacgtgataaagtttaacttcctaagggtcaccacatatgtgaaagcaagaatgtaagtgtgtaagtccatggtgagagcagaactagggtgataggccagacccactctccaagggctcgtacctcttaaccagcctccatacctcatgccatagtacagacctttagattcttggcaaatatcaaacttgcaaacattaaatttgtgaatcccaaggaattactgtgtgttctatggtgactttctgcccaagattttaggcagtctaaataaattgcctattgtatatttttaaactatagcaaaaatctatggcacaaaatagtgtaacagatgttagcatatgcaactactagagatagccacatttgcagaatgcttactgtgtactaggcacttttctaactattttatgaggattatctctagtccttacaaccaccctgtgagggaagtccgcttcatatcctcatcttaccagtgtggacactgaagcttagaaaggttagtgtcttgcccaaagttccacagctagaaaacgtcaaagcacatatgtgattccagactaccttatggccacacttcttcaactctatcataaccaaggtatctatataagagctctcccctaaagttaattatgtaggaatttaaataaacacacacacacacacagacacacacatttagtgtttagattacccctgaatgattctccattattagaaaatagtgccaaagttttctattattggcttatattatcataaatccaagaaatggtgggtcatagagaagacattgaactaacaggtatttgataacatcaaaggaattttaaaaaacctaagtaactgtactatatccgaatattaaatttttaaagggtagatattaaattatttttaaatgcatgcactactagattatcacaattcttggaaggaaacatgttattcttccagtatgctatatttttagaggacagtgaagaagcagcattccatggctttgtgaaaacgtgatttcatttgcgtttccttttaattatttttaaaataaattttggcatctgtatttaaagtgtttgaagtattttcttagtatcatccatgtcatcccttcttattctgttgggataaatggcttaatgtggatatcaaattcttcagtgtttttagcatcgactaactgattcaagcaaagtaatgtattgatctatacaaccaggtaatggattattttcgagcatccatgattcctctcatgaaataattgtgttccccacttccaggttgtggtgggattttccaggctcccagtggagagattcattctccaaattaccccagtccttataggagcaacacagactgttcttgggtcattcgggttgacagaaatcatcgtgttctcttgaacttcactgactttgatcttgaaccacaagactcttgtattatggtaagtgacataaatttcaagcattgtctccagtcaaacctcggtcaaaacactgccatataagcatatttagtgaatgtattacttatgggtgtttttaatgtcgattcataggaaaccaaactattggcaacttaaaatataaggacatttattttttacctaaaaacaaatcaggaagtagataatctctaggttttttagcaagtcagtttctgcgctaccattattagcctgttggcttttcattttgttgttacttcattgtcaaaaaatggctgcagtggtttttatctgaatgtcctacctgagtctacctctgaaaaaaggaagaagcaatagtgttaactatttctgttttgtttgtgtttcttttaataaggaaagcaaattttccaaaaaagcccctgatatatcattagccagaactgactacaaaagagatccagaaagtatcatggaatagatttatcataaatgttttagatcaattattattattaagcatctgggattttcacaggattctgcttctcttgagacaaggatatcttgatttgctacttgaacaaatccatgttctgatagaacaggttgggagatgggagtggaggagaaggaatatggctatgaattggtcagatgacaaaaagagtttctgctactgagatgggagggtttccttgactcctttacaggacttgcgaagggggtggcttatttgcttggctgcctcgctgaattcaggagggagcacacgaatagacgaatgcaggaaccggggtgaacgaaccctagaactggctggtccctcatctctggtgggagcaggctctgtgcacggcccacggcagcgtccaagcttgttacaatgctcttttagctctgccatctcggagagggtgtctgcgaccccaaaagccccaaagggcatgtgttgcaatcagtgctcttttagcatttgccgtccatggacagctaagtgttaaccagctcagtggagggtcagggtgacagccttttacaccctgacctcttggtacccaagttcttgtccagtgtccaggaagaatcaggtcacacgaacaaattgaagggtggtgaatgtggataactttattaagaggtagaagtggctctcagcaggaaggcgagcttgaaagaggttggaggaagtgggttgcaggagtctggccttccttggctgaactcctctctgaccatagtctccgatgtccagctccttcttctcctcttgacgttcagacacttctctcttctgtgtgtgtgtgtgtgtgtgtgtgtctgctgagtctggggcttggagttcttatgggcaccagatgggcgcagggcaggccaaaaggcaacatttgggtgggaaaacagggatggttctcactttgagtggcagatccaggcttgagggtggagcactcaccagggacctcaacctcttctaccaagcattttcctgccttctggcccatcactactaccaacacttttaatgcattcctacctgaaactaatgctttgcgcttcatataagagtgaatgaagttctattttgaagggttttttttttctttctgtttttaaattttttggctacctaattttcttttattattgttattattattatactttaagttctgggatacatgtgtagaagctgcaggtttgttatataggtatacacgtgccatggtggtttgctgcactcatcaacccgtcatctacataaggtatttctcctaatgctatccctcccttagccccccacccctcgacaggcaccggtgtgtgatgttcccctccctgtgtccatgcgttctcattgttcaactcccacttacgagtgagaatatgcggtgtttggttttttgttcctgtgttagtttgctgagaatgatggtttccagcttcatccatgtcccttcaaagtacatgaactcatccttttttatggctacaaagtattccatggtgtataggtgccacattttctttatccagcctatcattgatgcacatttgggttggttccaagtctttgccattgtgaatagtgctgcagtaaacatacgtgtgcatctctctttatagtagaatgatttataatcctttggttatatacccagtaatgggattgctgagtcaaatggtattactggttctagatccttgaggaattgccacattgtcttccacaatggttgaactaatttacactcccaccaacgagtaaaaacgttcctatttctccacatccttgccagcatctgttgtttcctgactttttaataattgccattctaactggcgtgagatggtatctcattgtggttttgatttacatttctctaaggaccagtgatggtgaactttttttttcatatgtttgttggctgcataaatgtcttcttttaagtgtctgttcatatcctttgcccactttttgatgaggttgtttatttttttcttgtaaatttgtttaagtttcttgtagattctggatattagccctttgtcagctggatagattgcaaaaattttctcctattctgtagattgcctgttcactctggtgatagtttcttttgctatgaagaagctctttagtttaattagatcccatttgttaattttggcttttgttaccattgctcttggtgtttaaatcatgaagtctttgcccatgcctatgtcctgaatggtattgcctgggttttcttctagggtttttatgattttaggttttacatttaagtctttaatccatcttgagttaatttttgtataaggtgtaaggaaggggtccaatttcagttttctgcatatggctagccagttttcccaacaccatttattaaatagggaatcctttcctcattgcttgtttttgtcaggtttgttaaagatcagatggttgtagatgtgtggcgttatttctgaggcctttcttctgttccattggtctgtatatctcttttggtaccagtaccatgctgttttggttactgtaggcttgtagtatagtttgaagtcaggtaacgttatgtctccagctttgttctttttgcttaggattgtcttggctgtacaggctctttttttgttccacatgaaatttagagttttttttctaattccgtgaagaaagtcaatggtagcttgatggatatagcattgaatctataaattactttggacattatggccattttcatgatattaattcttcctatccacgagcatggaatgtttttccatttgtttgtgtcctctcttatttccttgagcagtggtttataattctccttgaagagatccttcacatcccttgtaagttgtattcctaggtattttattctctttgtagcaattgtgaatgggagttcactcatgatttggctttctgtttggctattactggtgtataggaatgcttgtgatttttgcacattgattttgtgtcctgagactttgctgaagttgcctctgtctcagcttaagaagattttgggctgcgacgatggggttttctaaatatacaatcatgtcatctgcaacagagacaatttgacttcctctctatttgaatatgctttgtttctttctcttgcctgattgctgtgacctgaacttccaatactatgttgaataggagtggttagagagggcacccttgtcttgttccgggctacctgattttctaacaaaaagtttttcatctttcatttgtgtatatcaacatttcattcaaatacaaaccagattctcttggttactggatctttcaatgttagtgtcctgatagtttcctacacaagatccaactggctagcttctttcaaatttaacccaagaaaactcaaaggtttgtttacatttttccaagtagtccattttaatggtatgatttcaatattattttacaagattaggttattaatgaaagttaagtttatttatcactgtatattaaccatccaaatgagtcttcagagtctaagttggctaagcatcatgcagactgaaagcgtagaacatccagctactctcctgacaaagaccattttgaaattttggatgacatttacaaacatctttctaaaagtagccaatggttcatgaggtagtgtgaagtttctgagtgaatatctgagagaggtgtgagtccagtctttgggaccattttttcctgcagggcctttactgatccacaaaggtttagcagctcttctgagagcctctcaggacaaagaggaccaaagtttgagtccagagctttgttagagtggcagtcttggtaagccattcgtatcttaggtaaaatgaaaggaaaacagccttcactgagactgcattcaatatttgagttacctgagtgaatccccaaaatctgaagccatgaaataatgagagtgaatcttgtatttctcgtgcatctaggcactggacatccagcaaaagcaatttaaaatcttcttcaaagagagatattaacattctagacatcatttctacctataatttttcatgtgtaatagccgattaaataagagagttccctgacctccgttacaggacattcaacaggggtgtgtctcatctgttcaagtgctgcaggttcaaaccccttatgggcagggaaacatgcagacaggggtgcaggagccggggagagtgcttctggactccgggccccatggtagcatctaggggtgggtgcctacaactcccagagccctagtgggcatgctacagtgctcttttagctctgccatcctcagatggcttaagttttaaccagctcagtgtcctcttggtacccatcttcttgtttggtgtccaggaagaatcaggtcacacatggacttgaaggatggtgaatgcaggggttttactggatgatggagacagctcccagtgggatggatggggagctggaaagggggtggaaagggaagatgatcctccccctggagttcactgtcccatggccgatttcttctttgactgaccctggctgaactcctctcaatgttcagatgctccttctcttctctctttctctgctgtactgctcttctgctcctctgctcttctatttatctgctcatctgcttgtctacttttgaagcctgggtttaggggtttatatgaatacaggataagggggtgtggcaggccaaaaggcaaaatttgggtgtggaaacaggaatgcctgttcccatttagggccatgggtttccaggcttgagagtggggcctttgctggggaactgccctcttctacctagtatttccctgtatcctgtgtgtatcaccaacacactatcaaagatagtcatgtacttgaggggacaatataacaaaaatgagatgtaatatgagtaagagacaatagaaacaaatccactaatatgccagatagtaaagttacctggcacacttgctatacaactgtgattactcaactcatggaaataaaagtcaaactgagaactttcagcaaggaactgcatactatagaaagtgacattgcaatatgaagaagacccaactacaaatttgagaactgataaataccatagctaaaattaacacctcagcagaaggctttttggggggactaggcagagatgaagagataaatagtgactacagagaaacagtgaactggaagataagtcaagaatctactcagaaaaaagtatggataaaaaaaggatgaaaaatatataagagaggttaagacacatagaggacactcagaaaatatataacacacacttaattggagtctcacaaggaaaagagagatatatggaacagaagcaaactttgaagagctactgactaaaatttttccaaaactggtggaagtcatcattaaaaaaatagaatctcaaggaacccaaacagcaaagcaggataaatagaatgacgtacttttctaaaaaaaaaataataataacaaagataaagagaaaatgttacagtcagctagaggagtaggtaggtggggaacagattgcttgttagaaagtagagactaaatgctgacttttcaaccaggattggaagtaaaaaaaatttttttaaagacaatagactgatatattcagattaaagaaaaaaaagtaactaccggccaggaactctatgctctcctaaaattcctttaagaatgaaggtgaggatgtgtatggtagatcacacctgtaatttcagcactttgggagcatgaggcaagaggatcacttgagcccaggagtttgagaccagcctgggcaatgtagtgagaccctgtctctacaaaacagttaaaaaattagccaagcatggtggcacagacctgtaatcccagctacttgggaggctgaggtgaaaggatcacttgagggtggaaggcaggagttgcagtgagcacagatcttgccactgcacttcagcctaggcaacaagcaagaccctgtctgttaaaaaaaaaaaaaaaaaggaataaaggtgaaataaatattgaagcaaaagaagggtcttggcctggcgtggtggctcacaactgtaatcccagcactttgggaggcctaggcaggcagatcatgaagtcaggaggtcgagaccatcctggccaacatggtgaaaccccatctctattaaaaatacaaaaactagctgggtgtggtggtgtgtgcttgtaatcccagcgacttgggaggctgaggcatgagaatcgcttgaacccaggaggtggaggttgcagtgagccaagattgcaccactgcactccagcctggcgacacagcgagactccttctcaaaaaaaaaaaaaaaaaaaaaaaaagaaggtctttaagagaagtttgaatgggccagagacaaagctacttatagttttgaccatggtgggtattgctctaccccttgtttcctccctcgtctgcatggtgttcttttctttgatacagtgcagaatccatggaatttaacatacaaagtgtgtcaccaaaccaaagcctaggtcaacagcatgccagcatggctaggattttccctcttgtggtcatgaggagggttttccacctacatgggacataaacacacagacaaggttttctatgaacactgccatatttcagcatgcagctgggcttggcttaacaaagtgcagcaggaggaaacagcaggagtgaaacctcaaatgtgatcgggtcttaggcacggagatggaaaataaactcaaaaacaagtgctgggaggagtttgggctggtaggtaaggcaaaatataaaatgtaataatagtccaaacaagttgtcagaatcagataatgctgtatgaagtacagttgactcttgaacaatgctgggattagggtcattggccccctgcttccctgtcgtgcagtgaaaaatctacatacaactttcaagtcccccaaaacttaactactaatacctatgacggacagaaggcttaccattaacataaacagtcaattaacagatattttatatgttttatatattacatactgtattctttcaacaaagtaagctagagaaaataaaatgctatcaagaaaactgtaaagaagagaaaatatatttactatttattaagtggaagttgatcatcataaaggtcttcatcctcatcatcttcacattgagtgggttggggaggaagagggagggggcgctagtcttgctgtctcaggggtggcagagacggaagaaaatctgtgtttaagtggacccaggcagttcaaacctctgttgttcaagagttaactgtaggccgggcgcggtggctcacgcctgtaatcccagcactttaggaggccgaggcggggggatcacgaggtcaggagatcgagaccatcctggctaacatggtgaaaccccgtctctactaaaaatataaaaagcagccaggcatggcgggaactcgggaggcagagcttgcattgagccaagatcacgccactgcactccagcctgggcgacagagtgagactccctctcaaaaaaaaaaaagagttaattgtagttggaaaatcccagccagtgggcagaagagacattagaagcaaatacctctaagaacccaggcaagacattaaaataagaagtgagccacaccgatagtgtgagtcagcacagtgcttcagctaagaaatctagctctaatatagggtggttctggggctgagcctggactttgtgatattctagctgtgttctttggaagaaagttaacctttcagcttcagtttccttaatggaaatggggataataagaggacctaggtcagatttattgttaggtatttgagataatatagatgacctgcttgctgtcacatagagagttctccacttgtgctagccattatgatgctgctgatggtgagtgttttgggggaggttcatttaatgaggactagaagaagagacagcgcggaatactaggagcagaaatgcacttagaagtcagagtcagacatgcatgcccgtgttcatcgcggcactgtccacgatagcaaaggcatggaatcaacctagatgcccatcaatggtggatgggatgaagaaaacgtgctacgtatacaccagggaatgtgacacagccacaagaatgaacaagaccatgtccttttcagcaacatggatggagctggaggccataatcctaaatgaagtaacacaggaacagaaaactaaatactgcatgttctcactcaggagtgggagctaaacactgagtacatatggacacaaagaagggaacaacaggcgccagggcctacttgaggttggaagctgggaggagggagcaagttgaaaaccacccatcacgttctttgctcattacctgggtgacaaaatagactgtacaccaaacccccatgacaggcaatttacctctatagcaaacctgcacatggacccttgaacctaaggtgaaaggtttttagaaaaagaagtcagggtcaggacttgccgtctgtaattctgggcctcaagctcttaagcagaagagcccactttcgaatcttcctcgtagtatagcacctaggatttagcatatctagggctcagtgctctggaatcattgtgaaaatggccgacatcattcatttgggcctggaagccagggaagcgttcacactggaggcgacatttaagtggcagagtctcgccagtagaaatgcagcagtgaggccacgaggggaggctgcaagggaaggatggggaaatggtgcacgcacatttgggaataaaaaatgagagtgttgtccctggagcgtgaagaaatgccggggagcatgtggagaccaaggggctacagaagacatctgagctctcttctgctccagttaagaatttgaaattatcctataggtagtatggagtcagtgaaaattttctgtaaaacgggaataacatactcagagctgtattctacagtgacaacaggcagcagtgtgtgaagaatggcttggcagagaaaaagaaagatggtagcatgtctgtttgggaagcaatggaaaaagcttggatcagaggtgataaggtctcatagtaggcagtggtcttgggacacatggagagcgcagggacacgtggagaactgtcacggtggcagtcactagaattagaggctaattacatggtggtgggtggggctggtgatagagatggtggggggaagcctatttgcttgaagaatgaatgaatggccgggagtgatggctcatacctgtaattccagcactttgggaggccgagacaggagaattgtttgagctcaggagtttgacaccagcctggaccccatctctgcaaaaaaattaaaaaattagcctggccaagtggcacatacctgtattcccagtaactcaggaggttgaggtgggaggatggcttgagcatgggaggtcgaggctgcggtgagctgtgatcacaccactgtactccagcctgggtgacagcatgaccctgtttcaaaaaaaaaaaaaattgtgaatgatgaggccattaactgagtaaagggagtagatgatagtgagtttgacttgtaaacttttgggtttaaatattatatagtttgacataagagttcagagcttgggataggatctgagctagacatatacaattgaggataatttctgtatattgggtggttattaaagttgtgggagtaggtatgatcacttttaggagtattttaccaagagaaaggggccaagccaactcctggggaaacactgccatgtaacgggtggatgaaagatcagaggagaggaggctgaggaggtgcgctgagtgcttggtggagaaccagaagagagtggtagcattcaaaccacgagggaagctgaatttcaagggtgggtgatcaaaggtatcaaatcccatgcaggatgccaacgagcgtgaggattgcaacaaagcccctggattccgtctttaataacctgcaaggagcaggattgtggcgggtggtggtggaagactcaaggtcacagtggttaggaggtgcaggagcttctgagcttttccccagagttacggaaatgagtggcataaggagaaaatgggcagtaaccaatgggttaaccaaaatcagtggagagttggttttttaaaaaaaatggagaaatataagttgtgtgaagagggcaggtggaaaaagagcagctgaatgtgagagccaggcgaacagtagagaaaatcatgttttcaggacagagacaccaagaagcgccagattggttctatgaatgttgtactttttagaataagaaattgaaacccatggcttggcacaagatttttctgatttataaattcattatgttaaaaattgcataaattgtatacaaactaagtcattttttcttggatgatttataaatcaactttacaaaaagataaggaagttttaaaagaaaacaagactgtccaggtaagttggggtagagatctgctatatatttgccaaatgtgcccacttaaggggacaggaggtctgcagaggtttggaaccagaccaggcaatgccctggcaaggctggaagcttgttagttagttgtccagggattcatgaaggccggagttgaagcaccagccctctatctttacagccagatggacactggacgggaaacgtaccccaaagtccaacatcttacataatatctctgcagtctcagttcatataaagccaatccttcattttggagacattcaagttaatgtcctggtcctgttgcttagacagagttattagcaaagagaaaaatattcagttgccagtgatgctgtcagataatgttggggttcaggagatttttaacagagttcaagtgtactctttaaataccagtgaaaattatgctggaatgggaccagccatcctgttttttcaaaacttctataacaatttgggttgttagaagaagaaatagtaatttagctgtatgttaaatatgatttcacatatgattaactgtcataaacctatagatacatagaatgttaaggttggaagaagaaagcttagagttcgtttgctgttgtcacctaattttttaaaaaaagacattgaggtggaggtggggcagtgcaaaaaataaaaattaattaaaaaataaaaaagatactgagatccagaaatgtcagggtcaaggctaagtagaaattaacagcaggatcagcactaaaacgaaagccttatgcttcctacgaagtgaataagtattttggtaaaatataaaaattgcagttatgtacaggatacggaatggcagactagaaaaatagagggagaaaataaatttagggtcaggctggagccactttgattttttttttttttttgagatggagtttcactcttgttgcccaggctggagtgcaaaggtgtgatctcagctcactgcgacctccacctcccaggttcaagcaattctcctgcctcagcctcccaagtagctgggattacaggcatgtgccaccatgcccggctaatattttgtgtttttagtggagatggggtttcaccatgttggccaggctggttttgaacttctgacctcaggtgatccacccgcctcggcctctgattacaggtgtgaatgctgggattataggcgtgagccaccgtgcccagcccactttcacttctatatctgataagcccagccttcatttgtcaatagaaggaaaagtgttaagaattcaaatatgaaatggaaagtgtccttgctttgaagtcaggaggtcagggtttccttcattactttccccttcggtgccaaatatgtaccagacactgccaggtgcttgtttctggacgtgtaccacccctcaccctcttcatggcttggggttcttagtttgcttatttagaaaatcaggtgcctggggaacagaagcagaaagaagaaaactaaggaagaggattcagttaggagttgcatttgtgggtaagaaaaggaggacaagatggcagatgaaatggccactgagggcccagtgacgtcagtggtggtttcatcctcaaagttgaagtcaacctcaggcagccaccaggcttcacatgatctctgggttacaagactatccccatactcttctgggaatacaatagaaagctcttcttagagtaggcctagtccctataggttccaaattgaggcaagctaagcccacatgtaacagccattactcttggtgtcatggaaacaaaggcaaaattcgccaagtagaagaaacaaatgaacatttaaaaatggaacagtagactgggctcagtggctcacgcctgtaatcccagcactttgggatgccaaggcaggcggatcatgaggtctagagattgagaccatcctggccaacatgatgaaaccccgtctctactaaaaatacaaaaattagctgggttttgtggtgcatacctgtagtcccagctactcgggaggctaaggcaggagaatcacttgaaccccggaggcggaggctgcagtgagctgagatcgtgccactgcactccagcctggcaactgagcaagactccatctaaaaaaaaaaaaatggagcagtaatacacagcctccatcctctttcacagaacccacagcagtagtctttatatcgccaaagcaccaatgtttttgatgcatgaattgttaatagatgcatagctgaataaatgaatttttgtcatctctgctcctgcaatgctcagtgctttggtggaaaatctcagaggacaccattgggaatgtgctgtactgagttcactccctggcattgttattgatatacaatcttcgtgttgtgagccacatgagcacttagataacatcacagaagtgcgttttctagaattgcatgctgctataatgagaaaagggaaaaactggattttttgacttctattgaaattgtgatggcatcgaggggagctaatcaggaagctggacttgcaggcaggtttcaacacatttggtaatatatttgcactttctgctcagtcaccttcaagtgtctggtgtaattaaccttgggctctcctcaatgacacatcaggagcatttcttgctaaggaagctgtgggacccatcggctgggcatggccttgtctggtcagcacacaagtggcttcattacgtttcctttcacgaaggctgagtattaaagtgacctctgactgacagttaaattgcttaattagagcctttcttctaagtcttcgattcatgtagctctgcaagctcttattgatctcctagaaaggctgcttgtagctcagtgtgagagcaggaagaggaaagtccgttcagcagcaccagctggcccctggagattcctgacctctgcttccagcatcctctttgctcagatcattggaatgtctgctttgtgagaatcagcaaggagcagctcaaagcaagccgaccatggtccaggtcctgcctctcatttggaggaaaacacaaacgagggctaacagagcctggtaccaaaaagcaaaagcaaaagcaatatgattagtaacttctgaagctttttgtggctatctaggagaaagaaagaaaagtgtctgatgtgatccggaaaaaaaaaaaattccctgtgctcccacccaaagctgcaatgtctgttgttgttccattattcgacaataaaatgcagggtggaacagggcagatacctaacgcagcatcctcttttgttgtatttttgtaatacaccacccatgatgtgtttccttttaaaacactgatggtttccaaagcagagcaaacagacacaggaataatagaactctgggtttcaaagagatgatggaaacaagtcttctttaaatatttactgttttacaaacaaatccatgacagaaaccagtctctctctctcccctcctcttcctctctccctctcttttcctctctctctcttttcctctctctctctccctgtctttctgtccctctttctttccctcttcctcttgctctctctccctctcttcctctttccccctctctctccctctgtctctccttctctctctctccctgtctctccttctctctctctccctctgtctctccttctctctctctccctctgtctctccttctttctctctccgtctctccttctctctctttctccctccttctcttcttatctttccctttctttgttcctctctctccctctccctttttgtctctttctctctctcctccctgtatctctctctcactctctctttcttccctccctcctttacgccccaccacaggaatttttgtttccatctgatacttgaggatgatctttttcaaacgtttatcttgtgacttgcatttgtattaacatgcttagctactttgcttcctggtgcgggtgtcttattaacaaccaaatgctgagccagtgctttgaatctgcaagatgaaggaagagttgagttgaagccacagctctcaatctgtggacacgggtttggtttggcttggtttccatttcagctcagactctccttaaatgtttatttgtgaaagtaaaacgagcatcttagatttcttctcatgtcaacatttccaggaatctttgagtcagtgctcgcaacaactgcaagtttttagagtttatagtctcttgtaagatgtgaagactgagtgggagagtgtagaacaaagaaataggggtgaacgcatcgtgatatgagatgtggggttgtgaattgaacttagtattgaatttccaaggagcgtaactggaaaaaaatcactgacaaaggaaactgatgcttcctccttcctcagccccaagaagagatgctataatgagtaatattttcatttccttccgcattcacatttatgactgtaacagcttgtataatttcctgagggatttccctccctatcacttaatgtttcctctattttggagaagttcgtattccaaagtggcaattccattagcaggtataccgccatattataacatgtgaaaatacctcatggactctcgatcctcaaaatcactttgcacctccatgtgaattatctctcctgtgccctaaatgtcttattcttcaccacatttttgcaccctgctaagatcaaaggcaatccagggcaggagacctgtgttaccatctggagttaaaaatgtagcaaagcgggactggcacagtggctcatgcctgtaatcccagcactttgaaaggccaaggtgggtggatcatttgaggtcaagagttcaagaccagcctggccaacatggtgagaccctgtctctactaaaaatacgaaatgtagctgggtgtactggtgcatgcctgtaatcccagctactttggaggctgagacatgagaattgcttgaacctgggagacagaggctacagtgagccgagattgcaccactgcactccattctgggcgacagagcgagactctgtctcagaaaaaaaaaaatgtagtaaagcataagggtccaggtgagaaggaggccacactagaccagagaatggcggttggaccagagaaggacaaggaggagctttatatctgaatccaggaatagaatcaagtttatgtggcaacgatagaagttctgggtttatgtattgaccccagacactgtgctctttgttacccattctgctaagtgagccatgctgggaatcccatgcacgttcactggaatggaatgcaggacagatgccaaccacttggaaagccacgggagcccaatataagactttctcaaatgctactgaggatgcttgattgcaggttcagatgcaaaggatgggggactcccaccctatttccagagctgctgtggttttctttcttggagaccgtgaatatctcacttagcttcacagaatcatggtctctcaacattctaactgaatgaatacaacttgatttcaccttttctctaggtttaatcatacttggtcggacgtcagacagatggggtttgtatattggctctgcactgctaagcgtgtgattgggcaagtcatgtatgttttcagagctcagttttccctgctgcaaagtggaactgtaagaatcaaatgtaaacaaatgtatttaagtacctatcagtgtctggttcagataagtatttgctgctattcctaatttttctattacaatgactcctgcttctattactattaacgctatgttaaagatcttaaggaatcttttaaaaaaattttctccctgagcaagatgaaacttagtaaacaagataaaaaatccagtagaaaaaaattcctcacttcctactttccaacaatctcagggaatatattcctgttttttttttttttttagaaataaaaatacagatattactgaggaagctacaattcatttccccctcagtcatgaggggtgcaaacgatgactgacatttcagtcaggtggtcacgagccatttaatcaccccagggttttgattacagcagagaggggcagccgctgaagtgctctgcatcacgtccacgtcaatcacgtggtctttagtgcttaggcaaagcatgcgtgattactggtctttatttcgtgcaatttaaaaatgtatgctcagctttactttagtatgtgatgttacattttagaaagcgcacgctgtgcactgagttgttttgagactgaatggaaggaagacacaaatggaaggcaggggaaatttcagggtgttgtagtggcctaggcaagatgtaatgaggccccacaccaagacaccagagagggacatggatgaagtagagggaaggagccaagcgatacatcggacaaacagatgttagaacatgctgatccactacatgtagcagggatgggggcggttccccaaacggtctggccgttgggtacatgcttccggcatttactgtggcaagaaatgtaggtaagggagaaatgagagggacaggaagagggcttcagtttgagacactgattttcggggtttgtggaacatggaagagatgatgtctacgatacagttgtctatacaagcctagggcttaggggagaggactggggcacagttgtagatattaggcaatgaacagatgctttggagatcttaaaacagaagccacgtccattaaacttgatacattcctggcggcagcaagaggctagattaactggcgttagtagccatctggcttgggtgctgcagtgctgttatatgaatagtgccctttcatgtctgtatgtaatcacttatgcgtccgagtgatgaaacactaaagaacttttaatatagattttatttttaaaccttacatgctcctcatattaaatttgtagaatacagaaaagaagaaataagaaattattgccatccttagtattacaatatagatacaagctattgaaattttggtttatttccctcacaaacacacacatacaaatatatacacgcactcatgtacacacaaacatgcatagttaagataatattatatataattttgtatcttgcctttttcacttcatattatttgaaattttcttaaatagtttctttggctagtcaatgaaatggacgtgctgtaattcagttagccacgctttattattaaccatttggattattaatgggttttttcttttcttgttataacaatgctatgaggagtatctttatatgtgaatcttagtacatttcctattatttcctttatatagcttttcttttctttattgaacactctactatgaaatattttaagtatgtagagaaataccgactatataatgcatacaaagtatataacatacaaaaacttctccctgtccagactggccaaatcttcatattttgccacatttgcttcaagttcttttgttttctcccaaacagaaatgaactgttcaagacacaggtgaagtcccacatgctcctatcattgatcccatgccctgttccccgtcccagaggaaactgctaatgagatttctggtttgtgattcccatgaaggtttttatagttttttcattatatgcatatatccatacacactatgaaatattattttgcatattttaagactttatgtacatcatgtcacacgctacatatccttcttcaacttgctctattcactcattattctgtttttcacattttctgcattgtaatgcatacagatctaatgcattcttttagtcactacacattctattttatatatgcaccacaagtcatttgcccattctcctgttaatgaacatttaagttgcttgcaatatttttccttagcaactttttgtaccgaatattcttgaagcaatatctgtatgtaaccacctaagactttctctagtgtaaacctgcagaagtggaattgctagcttttaacttttctgtatgttaaatttcgttagaaatttatatatgaggccgggcacagtggctcatgcctgtaatcccagcactttgggaggctgaggtggatggattgcttgaggtcaggagttcgaaaatagcctggccaacatggagaaaacctgtccctactacaaatacaaaaaattagctgggcgtggtggtgtgtacctgtaatcccagctgcttgggaggctgaggcaggagaatcacttgaacctggaaggcagaggttgcagtgagcaccactgcactccaacctgggtgacagagtgagactctgtctcaaaaaaaaaaaaaaaagaaaaaaaagaaaagaaaagaaaaaagaaatgtatatatgagaatttctggaacgaaatgagaaaaacttaccttcatacttgtaatcagtttccacaaaactttcaatacattgtcttatttgatctttacaataaccttatgaggctgcaaggggagtttacctaccctcatttttagatgaggtctctgaggtggttactgcaaagagcagtacagcatgtgacttgaatacagcactggacagcctcattcttcggaagcctttgttcttcattccacacccgcagacttaccccagaacttaccagcttaagacaacaacatttacagtttccgtgggtcaggaagccaggtgccactcacctgcatgcttcctggctcactcatgtgaatgtacacagggttcagttccttgcaggctgttggctgaggcctcccttgactccctgccacacaggcctctccacggagtatctcagaacacggcaccttgctcaccagggcaagcaatagagaggacaagagagagtccaacaagacagaaagtgctagcaagagggcaggaaccatcttttctcacctcattatggaggtgacagactatcacttccattgtattctgttaattagaaccaatcacgaggtctatcccatacgccagggaggagattacacagaggcatgaataccaggacgtggggctcactgagagctgggtcagaagttgcctaccaccccccacccctacaatctccagttggaaaattttcacttcttatctctcccactcctacctacccatatttctggacaacccccaccccaccccttggttctcttttcttttttgcctccatagctttctaattccctacttcatttcttacacagcaatttagctcccactttgtctcactttgatactagaggctaacatctatcacatgcttactacatgccagccactctcctaagtattgtatcttttaacttattcttgtgaacagtatgagctatatattcatattaatccaattttgcagattaagaaatttagcaacagatgagaaagcaaagagaagggggcaacttgtccccaacaacataaaataacacctcccctactatactcatgttctgagagcctatgaagatattttcgtcaataaagattgcttttccggccgggcgccatggctcacgcctgtaatcccagcactttgggaggctgaggcgggcggatcacgaggtcaggagatggagaccatcctggctaacacggtgaaaccttgtctctactgaaaatacaaaaaaattagccaggcgtagtggcgggcgcctgtagtcccagctactcaggaggctgaggcaggagaatggcgtgaacccgggaggcggaggttgcagtgagtcgagatcccgccactgcactccagcctgggccacagagcgagactccgtctcaaaaaaaaaaaaaaaaaaaaaaaaagggattgcttttccctctaaaaggaatcctgccaccaacttttaaataatgcaacatgcttttaaataatgcttatttataagacaaaggtgtgtatgagaattaaaaagttccctttgcttggcttctttattttcccacattaccgttctttagaactatgatcacaggcctccagaactagaaatgccaccaggaagggatgttggtctcacacttgaatggttttcctcctgtgtcacttgacatgtgacaaagttgaacacatgttaactttagaaatgatggacatttatgcaaatctcctcaaggtatcgaagcatcaggtatgaaaattaaggccgggcactgtggctcatgcctataatcccagcactttgggaggctgaggtggcaggatcgcttgagccaggagttccacactaggcaatacagcaaaatcccctctctacaaaacatttaaaaattagccaagtgtggtggtgcacacctgtagtcccagctatttgggaggctgaggtgggaggatcccttgagcccaggaggtcaaggctgcagtgagctgtcacaccactgtatgccagcctgggtgacagggtaagaccctgactacaaaaataacaattataatactaattaaaagaaatttcataaatgtttggcttagttctcacttctggctagagctgaggatgtggaggggacttgatagcaccataatatatcatgtgttcagaatactctgggccttggggacgggtccaatgtcctctgcccacattctgcctctgccttctctcaccctgttggtgaagggcccctgggagcggagtgcatgacattggctgtgccctgtggttgggccccttcattctccttcagacctggcatataggaagcctgcccagaaagcagccgagctgacctccgtccccctgtgactaacctcttacccacaattgtgtctactatgtgtttacagcattgaatctatgagggcaaggacagctgtttcttaactcagggttttcctcaaccctagttctcaatttttagagaccagcaactgtcatacatattcatttattcatttgttcatcaaacatttattgcctgtatgtgccaggttctgtactttttaaaaagtctcctatttttatataataaagttaagctttttgtttttgtgggggttttttgtttgttttgttttgagatggagtcttattctgtcacccaggctggagtacagtggcaccatctccactcattgtagcctctgcctcctgggttcaagcaattctcgtgcctcagcctcccaggtagctgggattacaggcacacgtcactacgcctggctaatttttgtatttttaatagagatggggtttcaccatgttggccagactggtctcaaactcctgacctcaggtgatccacctgcctcggtctcccaaagtgctgggattacaggcgtgagccactgcacccggcctcatatgtattttgaatatgtgtgttagtatcttggcattttataaaattctggatattttacaaaaagactggtcaacttttctgtagaaattaaatgaccactccattagatctgcctctgttttaagagcttcggcagttagaattctctgggggacagtggccactttttattttgtggcttcaacttcaaatttttattttattactatcatctagaaatgaattagttgacatgtacaaagttttattttgtttgtatattgccctgacttttaccacttaagtaacgatcagaaaatcaatgctgaggcctagcaaactcttggcagtagacttaagtaagaattatatgttatattaatatatgtgtatccaatagtaatatcatttgctagctttgccttgggaactaaatggaagttaaggtgaaattcatatcgataatttttatgactttagaattgtaaatgaatgggagcaaggtttctcatattttcttccttgaagtgcttttcttgtggaattttataaattgaaactttaaatgtgagttgttttttgtctttttttttttttgagacggagttttgctcttgttgcccaggctggagtgcagtggcactatctcagctcaccacaacctctgcctcctgggttcaagtgattctcctgcctcagcctcctgagtagctgggattacaggcatgtgccactacatctggctaattttgtatttttagtagagatggagcttctccatgctggtcaggctggtcttgaactcccgacttcaggtgatctgcccacctcagcttcccaaagtctgggattacaggcgtgaaccaccacacgaagcctgagaataatgatttgatattataagtgttaaaaacactcaaatgaaagaatttatatttcaaaatctgttaaaaatattctccctccttgatagcctgaggtttcaaaatttcataaaatgacaattaggtacataaaacttaataactataatgctacggtttgaatgtgtcccctccaagttcatgtgctggaagcttaatacctcctctagtgtcaggaggtatggcctttgggtggtgttcaggtactgaaagccttgccatcatgaatggattaatgttgctataaaaagggcttgcaacaacaggttctctctcttctgcacttctgccacttggtgacatgatgttcctccccacaagaggatgcaccattcaaggtaccaccttgaagcagagagacccggctgtaacttgctggcagcttgttcttggacttcccagccttctgaactgttagaaataaatttctgctctttataaatcacctggcctcaggtattctatggtatcacaaagaagcagactgaggtgtgtcatgagcattttaaagagaagtaacatggtaaatctagaatttggagagagaagacgctgctactcactagtgatgtgaacttggatgacttactagcctacattgaatgagacagtagtttaatagcttagcacttgcctccctgtctttatttttatagaaaatcacacaggttaggatgtttgtgatggagcttgtaaaattataacatgctcatcacatttggggtgtcattggtatataatttgaattccgggacacatgaaaaccttctttttattgagatggagtctcactctgtcacccatgatggagtgcagtggtgcaatcgcagctcactgcaacctctgcctcctgggttgaagcaaatctcatgcctcagcctcctgagtagctgggattacaggtgcccaccaccatgcctggctaattgttttttgtatttttagtagagacatggttttgtcatgttggccaggctggtcttgagaaaaccttctatttttgatccattccttgtgaagtattacttcagccagatgaattttagcagaggtcttgtaattccaggacctcaggggctgggggtaggggaaatagctgggaagtctgtaaagcttctaggtgtgcccctttcaaaggacccccaaggaaatgggtgattcgggtgattttctgaagatttcagccttaatattttagtttacttttgttccccttatttcctcttgtcccttgagaggattccaaccactcagactgaaaacaaggactgtgagagggaagaaacaatatgtacttattccttggacctttgaatttcggagaaaatttttttaaaaccagaagagtcttattttgtgagtccatggacttgcaaaatcttagagttttttcttttttttttttttgagaagtctataaacaccatagaacccattgttccactagtttaaaaaattaagaaatgctagacacttaggttgattccatattttggctattgtgactagtgcttcagttaacaaggaaatgcagatatattcaacatacttatttaatttcctttgtctgcttatcccaggagtgagactgttggatcatatggtagctctatttttgattttttgagaaatgtccatactgtttttcataatggctgtatcaatttacattcccatcaatagtgtgtaaaggttcccttttccccacatccacaccagcccttattattttctaattgggattaagtggtatttcactgtggctttgatttggatttcactggtgattagtgatgttgagcattttttcatttacctgttggtcatttgtatgtcttctcttgaagacaaaaagacttatcaatggatgaatggatttttaaaatgtgatatatataaacaatgggatggtacttagcaatagaaatgaacacaatcctgtcatttgtggcatcatggatgagcctgaaggactttatgttcatggaaataagccaggcacagaaagataaatattgcatgatgtcactcatttgtggagtgtaaaaatgctgatctcgcacaagtacagggtagaatagtggttaccagaggctggggacggtagcagggaggaaattatggggagatatttgtcaaagggtatacaattacagttaggtaagaggaataagttctgatgttctataacacagtagggcacccacagtaaacaatattctggtttataaatattatagtgtgttaaaagtaactagaagagaggattcttaatggtctcaccacaaataaatgataaatgtttgaattgatggacatgctgaataccatgatttgataattacacaatgtatatgtgtattgaaacatcacactatccctcatacatgtgttcaattattatgcatcacttaaaaccaaaataaaaaataaatataaactgtatatattcataaaattgaatcttaaacttttataaaaatgaaaaaatgctattctaaacaaataaatgaataaattatcttgagagaagtaaatagtctgtgccttaagattcaattggtgtattctccatactctgtaaccacagatgttctaagaaggtattcattatcctttgatattaaaactaagacagtattaatagaatattactacaagcttaggacactgtatctataaccttaggacagcataaaaccaagtatagagataataaagacttgaattaaaccaatggtggtgatatttgagagtagactcaagtatgaatgtagtaagaggttttgtagtgatggtttaaatgtcattttgtctactgtttacagtgttcaacgtgttcaaaggaaggattcatactagattggaaattataatttgaattggttagaaaaatggaatttagtttttaatcaatctttgttgaatgaaaatcagtcatcaggtttcatttattggagatatatatatatatatttaaattttgaacattaaataataaaaaagaaaagatttgctgctccagaacagacccacatttgttttaaacttattattgtaagagctttagctcctcagaaagttaaaaatcctattgatatttgattcatgggcttgtataagccaaactgagaatatcctgccaatcatacctgtggctaaagagaacatgcagaatcatacctgtgtgctaaacagaacactgattataatcatcaccagatttttaaagtcacttgcgagtaacttccttacattgaatctccgaactttctatttttttccccaagattttcttatgaaatataaatggcaatttgtttttaatgaaatggccatattttaccttcatactttcagtcacattctaatggttggcaggttgatgcatgcgtcctgctcagttgataccttgcagtgaacaagaggaaagggtttcaattctggactctggaatctagtggtctgattcaacgtgacctgctccctcttaggaattgtgtgacttgggcccattacttaggctctctgtgcctctgttgtcctgttcttaaaaacagaaagaaatttgggaggataaaatgggacagtgtacgtgaagggctgaatccagttcctggcacatagtaagcactaatgaatgggagttattattaatcatccaagcaaaggaactcatttcccccctgatttacacataagagtattcaaaaattcatccagacactgagttccaagcaaattagtaagcttcaaattttacaaatcaatacagagatttcaggtatatgtgacatagattccatttcattacatgcctggagggtcagctaggtcccagcatggcactaggcaagacagagaccaacagttaaaaagagagaggtaattttcttttccttttttttttttttttttttttttttttgagacagaatctcgctctctgttgcccaggctggagtgcagtggtgggatctcagctcactgcaacctccgcctcccaggttcaagcaattctcctgcctcagcctcctgagtagctttgactacaggtgcacaccaccacacctggctaatttgtgtattttttattagagacgggggtctcgccatgttggccaggctggtcttgaactcctgacctcaggtgatccacccgcctcagcctcccaaagtgctgggattgtagatgtgagccaccatgcacgggcaaaaagagagagaggtagttttctaaatcagccttatatcacccctatcgtttgaaaagaattctgccatttctcttctcttgagcattaccctatcacgaaacttatgaagaacaaacaggtccaacaaatgttgggattctgacaacaaatgctcatcactcatcattatttctcgtctgttttctcatgtgtctattcttgcattacacatttccagcacatgttgtgggcatggcctgtgaggtgactacactggggttgggaaggaaggggagtgtggaagggacggcatttatgaagatatcaagaaatctaatagtggctctgacagaggaagtcctgctgaaattcacgtcagcatccctagaaatgaccaaagacttgttacagctgtgagaaaggacaataaagccagtttccctagatccagcaaacgtgtgattatccactagtatatcggcgtgcagacagttcgtggaatacaggccttctagatgtgaatctgaaccactgtttgccctgtctcctttcttgtaggcatacgatggcttaagctccacaatgtcccgccttgccaggacgtgtggaagggagcagctggctaaccccatcgtctcctcaggaaacagcctcttcttgagatttcagtctggcccttccagacagaacagaggcttccgagctcaattcaggcaaggcaagtaccctgtggatcttcccaggcacaagagaaatcttcagtgctctgtttggtgcaacagtgaaatgagacctgtgctcagaaattgatcacagccttctacttaacatgtaaaaaattaaatagaacaaaagaactgtgacttacaattatcccaactcctgatgcttgtaaccttctccttctctgacttcctttggacccgcatctctaacaagtttaaaagtgcttttaagactagaaacagtataaaaaagttttatccaaattcactgatctagcactacccaaggctttacactagaatgggatacactgctatcaattacaagacttgcttgtaatgtattcagatgccagcccctggaagcagtggtttccctcatttctgaatcctgccattgtccaactgaggagtcactgttgttttccatttatttttctttctttgttccctcccttcctcccctcttcttccccttcctctcctccccttccttttcctcatctctctttccctccccttccctttctttccacagggtctctctctgtcacccaggctggagtgcagtggtgcaatcacggctcactgaagcctcgacctcccaggctcaggcaatcctcccacctcagcctcctgagtagctgggactataggtgcacccccacgcctggctattttttttcttttttagagatgggatctgctctgttgcccgggctggtctcaaactcctggcctcaagtgattctcctgtcttagcctcccaccatacctggccatttttgttcttaaatcaccacttctccaagacctttttacccattgcctttcatctgctcgttctaagagatgaaccccttatcccatagtcagagatgacttgtattcagatgactcagaacattcactacaaatacatttagtctgtgtagtcattatgtctatcttagtcaactcgcttatattctgtagtaaagagctctggatggggacagtgcctggatcgaggtctcccaaatacgcaccatagacctttagactttggagcaagacagactatattcttgttgattttaaagaaaaactagtttcctaatagttcttttgcatgttattattcacttgtttgttgcttcatagtaaaaagtccctgctagctttcatccggactgtaacaacctcctgaaagtcacctacccttaccccatctctctccaaagtcgcctgtaaaagccctgctctgatcatgccattggaatgctcaatgtctgtcccgtctccacctggcctggagaataaagctcaagctcctgcagatgttaaccaagagccccagaacccaccctgacctctctccagcgtcagtcacccacatccctggggcaccccatgctccagctgagcctctatagatgctcctctgtgtctgctcaggcagtcccctccctggcctcccttttctcaccctccaagtcctagtttagcctcggcctcctcctcagcaagactcctcttacgccctccagcggtgaccgcctctccctcttcaagactcacatcgaattttgctcttctctagtaatctacagtcatccttatgaagccttattcaattgagtatttattttcctgaaaaaaagaggtcatttataagcagattatccctatgcctatgatttatgagtgggcagtgtaagtgaatccatgcaagaattttgtttgaatgacttaggcaattcatagacatttaatctgttgctttttgccacttcctacttcctgtagttgaagaataattgttaaaaatataaactgtgctcctgttttctcatggtttatgtacagctctccttatggagaactttcttggcgtgcattttagaaataagaagaaaaatcattgatggttttattcatcaaataattgttttgtacggtcagtagaaatgaaaagcatatgacatgtatgtgtgtttgtgtgttccccagcctgcggaggccacatcctcaccagctcatttgatactgtttcctctccacggttccctgccaattatccaaacaatcagaactgcagctggatcattcaagcgcaacctccatgtaagtaacaaaaatgaaaaagaaaaggcacacaggagagaaggtgtctgtgggaaggtcagtctatgagtaaccttcttatctcagtgctaacaatcgatggccttcctcttcatcttttgcaagtcccaattcctgatgtgcttaagaacaagcatttcctaatctgatagggaagtcatttctacagttgcttctaaatttaaaaacaatttcttttttttcatgtcaaggcctagcaaaggttaaaaaacacacacacgcacaacaacacaacacacctacaaccttgctgtattaacaggcgtatgcaggcgtatgagattgggggtaaaccaaaataatcgataaatagtttttgacatgtgtgccttgagtatagctgatgttcaagacagttgctgagtgaacaaatgaagaagagtcacagactggagaatcagtgactcacgggccagaatgcaatgcgcgcacctatccatcaaagcaaacattcataaaacctgggctctcctgcaaggtactattccagcacaggcctagaagaaacattgaataaacgcttactttcttttcttttttggaaccctagaatcttattttctgacctggtaacagtccgatggtaaggacttctgtcctcattttacagacagagaacatcaggaaatgcccctcaaggacatgacagaatggctgcaaagcgggtgatgctggggcccttctgaatcctgtttcagaggagccctgccctcctttgaggtttgcaggaaaatacagtttcaggcataatgtaggaaagtctttaagttcttcactctgcacagtaattaatcgcctgtgtgaaaatagggaagtcacttaagctaatcaggccatgaaaaagtaatctgcaaaatgaagagtttggcttaaatattctctagcactttcccctgggatgtcaggagttaacaaattgctagtatcttcattgacatgcataagatgtggcagccgatgatgtcatccttagccaattcaaacggggaggtggagccccaaagaaagttgccagccagccagaaactgagctgtagataaagaagccccctcccttgaactgagaagtttgtgcctgaggattattttctaatgagttgtaaagcatttagatgaaagatctcactggttcaagaacagcaataggaaaagatcctattctgaagattagggagcttaaagaacaacaaaaagaaaatgtatccaggtgcttgctgttctgcaagtaattcaaaactttcttgataaatgtctctgaaccttagggcactagctctagcctgaaaataaaactgagtgagctaaaatgtgggctccagggagaaaagaatgccttatttacaagcacatgcaaagaatccgaatttaaggaaatgagtctattgagaaaaatgcttctgcgaggaacacagcaatggtgatataaaaactggaaagacggcattttccaacaagatattcccttatagtgcctggaatgaacctacccaggagtcctcttatttaccactgccagtgtttcagatgccacaggcagtttcaaaagcatctattccgttactcttcaaaggaaaccatctattctattactcttcaaaggaaaccatctaggatagaagttgtccccttcccttgctttatcccttcaaccatgtgcaaatccgcctcattcattacttctctgctggagaacccttacatgaaattaccagaagtaaaatttatctccctgtatgttttttaattttaattttattttgtaaaaaaattttattgttaatttttgtgggtacatagtagatgtatatatgtatggggtacatgagatgttttgatacaggcatgcaatgtgaaataatcccatcatggaaatggggtatccatcccttcaagcatttatcctttgtgttacaaataatccaattctactcttttaattatttttaaatgtacaataagttattatcgactacaattaccctgttgtgctatcaaacaggtcttactcattccttctattttttatagtcattaaccatccccacctccccgtcttgccccatctccctgtatgttttatttgccagtactttacgagagagtcttctcttttttcttccagtaaatcatatcaccctctcttttacccactttgaacttgaaagaagcacaacgtgtgcacgtgactttgtagaaattttggatggcggccacgaagacgcgcccctccgaggtacctcagcgttcactcatctacatctgtggtcttggctgtgctttatttatagatccgcatatttataggctgccattctaggttgcaatgtttccaataaatagaaagagcagcctaagccaaataaagatgattagagggtaagaaagcaggcttgaatgtggggttcagggaactcagcctgtttattaatatattcaaacgtgtgaatagtttgtgtatatgttttaaaacatttaaaaattgcagctgctttaaagaatagtggaatgcaacccatcccagcattaggtagcattctatcagaaatttcttgttaatatttgaccaagttcttacattcacatggagtatgtttctttcagccttgtccttagtggaagcgaaaaaaaaagcacttaattagataattaattaattaattccattaaaaatctgtctttttgtttgttagacatcccaataaaattaaagagtgccgctatctagtttctgaaatgctctcaggcaaaacaaacaaacacacacacactacacacacacacacacacacacacacacaccaggccatttaagctttctccgtaaatttcctaacttttgaattttgttgtaaaaacttctcatcctgcactagaagacaaggtctgtcagagaggagactgtttggcctgttgcctaattcccagtgcccaggacagtgtctgagacaatagtgaacaatcaatgaactctccacaccctatgcacacctctcacagcatttgttagtaagcatttgaccaaggataagggtatattatttaacaagctgttacatagcaataccttgcgctgagtactgttctcagtatgttataaatagtaggtcaatccttgtaatcttatgagataggtttcattattttcaatatgcccctttttccaagtgaggaaactgaggcaccaagcacgtaagtcacttgcctaggatcacacaactagcaaatggctgagccaggggctgaatccaggtagcctggctccagcatccacacttttctgtgctacaaaatagtggatattagtgcatttatttgtatgggtccgactgggctggagatttttgctttaggtacatgtgtcccttggtcatctaagtttttcctctggtcctattgttcttgatcatgtttataaatcacctctcctatatatagctcctatatatagtttattttaaatcatcaggtattgtctcaaacattgaccctgaatgaagtggttctcctagtggcaatttcttcactttgttttggtctcttgtaattcgagtaaagatgtgtttcctagaaacagcggtctctgccatgttgtcattcattctccttgtcattatcttcattatttaggccgttactgtggcaccgacatgccccatcctatcacatccttcagcagcgccctgacgctgagattcgtctctgattctagcatcagtgctgggggtttccacaccacggtcaccgcatcagtgtcgggtaagaaaccctagcacctgactctagcggttaaaagggatgtggtagaaattcttggtttgttattggggactctgaccttcgtagttgggagccagtttcctgagatcacctctgggccaaatcttaccttcttcccaattaagtgatcgtgttgtcaattctagcaataatgaactctggaagtgtggaggattggttggaaatgtagctgtcttttcagctacatgccatgctatcagatgacttggtgttcttttgttgtttttgagatggagtctcacttggtcgcccaggttggagtgcaatggcacggtcttggctcactgcaacctctgcctccccaattcaagcgattctcctgcctcagcctcctgagtagctgggattacaggcacttgccaccacacctggctaatttttgtatttttagtagagacgaggtttcactatgttggccagactggtctcaaactcctgacctcgtgatccaccagcctcggcctcccaaagtggtgggattacaggtgtgagccacctcgctcaccctggtgttctttttggcttgtttgttaaggcagccctaacctggggaggagaggaacgaggagctacccaggactgggtttcttagcctcttagcccagagagtgctgttggtcactgccatcttccttgtttttagtggttaaaagctacagaacacctagaagattggtgtgtgcatttcggtgctctactgagagggaaagcaagcatgctgcgttgggttctaggccagggttgaatagaatcctggtcacaaaagccaagtggctgtaggatggtaaacaagtcttttattcttcaaagttaccgttcacaggaagaaacggctttgagaaaagacattgcagaaattccttctaatccaccacactgcatggcccttggtcttcagtttgcagaattgttcccttattttatatgacatgaatgttttaaaatgtgagatggaaatactatctattcttttacattgataatggctctagcgttctttctcctttattttatagtgtctgatgcagtctttgctctgatactcactttatttctattttcttccagcttgtggtggaacgttctacatggctgaaggcatcttcaacagccctggctacccagacatttatccccctaatgtggaatgtgtctggaacatcgtcagttcccctggcaaccggctccagctgtcttttatgtaaatccttttttatggtgtattgtttcagtgctaatgaatctgtaggaaagaagttctggtgctaataggatgggcaactcatagtgtacgtgaaatttaggaagtatttttccaaatttcctctgtttcagtcatagtttgagttataaatagcatgaagtttctctcgaccatggttcttgggtcctgtctaacatttccaaaagtacattcttgagtccttggtgaatgaatgaatctgtggcgcattcatgttcagagtacaggaatcttatctttttttttggaattagacacattaaggttcttccagggaatcactagtattgtttattccagcagagccctcccatctcaattaagcattctttacgcttttatcttatccctacctcaatccacctttccttctatttctgtcagaagaatggttctggggctgggtgtagtggctcatgcctgtaatcccgcactttgggaggccaaggcgggtggatcacttgagatcaagagttcgagaccagcccggccaacatgacgaaaccccgtctctactaaaaatacaaaaattagccaggagtggtggcgggcacctgtaatcccagctgcttgggaggctgaggcaggagaatgccctgaacctgggaggtggaggttgtggtgcactgagattgagccactgcactccagcttgggcaacagagtgagactccatcttaaaaaaaaaaaaaaaaaaaaaaaggaatggttttggaagtttttttaacttccaaacttaaacttacttaaactttaaacttaattttttagaacactttcatattcctcattgcactataacactttttgaaatggactataaatatggaattagtagtaggatcctatcacattctgagtggtcttagattaaattagacagcaacaataatatgtcctagagtagatgtaaaaagcacacattttaatcaactgatagagaggtatatgtgacacgtcacactgataatggatgcttattatatattgagagataagatcctggaatttaaattgccgttttgaattgaaatttatttaccagtctattttacatattactaggctgtggttgggattgctaattctgttttgaagcgaatataagtaacttatggttgagagaagaggattgttttgaggaccctgtcctgtttatttaaaagtcttacttttcttccaagacttgctaatctgtgcatcaggaactgattaaaaatatgggacaactatcctatttgtggaccaagttcaaacatctcaagttgctttttttaatccatcaatcagacagagcctcttcagggtataagtggccttgtgttaaaacaaagacaccctctgcatgccgaaaggcaatgcaagtttaagctgcctcacaggaaggaggttttggtttgtctttttttttttttttttttttttggagacacagtctggctctgttgcccaggctggagtgcaatggagtgacctcagctcactgaaacgtcgcctccggggtttaagctattctcctgcctcagcctcctgagtagctaggattacaggcacatgccaccatcccaggctagtttttatatttttagtagtgatggagtttcaccatgttggccaagctggtctcgaactcccaacttcaagtaattcacccaccttggcctcccaaagtgctgggattacaggcatgagccaccgtgcctggcctggtttgtctttgtcttcactaagagcacagcgttctggatgggaagaaatctatatactttataatgtttaccagacatatatttattctttcactcaacagatatttattaagctcctaatatgtgctaggcatgtagttggcacatgctactctcctatgaggtgccttctatatattgatcaataaaacaccatcattgtccttagaataaaatccaaagcccttcgcacagctttagtaggcctatcagaattgccaaataaaatgatttttttttttggtcttttcctgtttgtctctaccacattcacattgttgactgctctcattcagtggttgccaggaactgagctaggtgttcaagacagataagatttcaggtcttgacaaattactcataagccaacattaagaagctatttaattaaattcattttatttctgtgggataataataacaagtttctataaacaaatttatagtaatttcaaatttctaggactgtgaaggttaaagaagatgtcaaatttaaaacgcataccacacagctagtgcatagcaaatgtttggtgacttaattctctcaatctttaccatttctgaagtatcttctgtgatagctcacaaataaatccaaacgggcagcactaggctctccttccagaggatgggagattacacacacagaaagcaagtttcatctatttcagtgcttaatagacattacattttaattaccatatagaacatcgtaatgactcagctatttcctttctcgcctgtaagaagttaattttgattcctctgagttacttgcttgagttttatttttaaaatggacgttttaggctgcaagatgcctctttttttgcagttgattaatgagaaggcaaggcctgtgagttatttctgccctggtctaaattctatccagatggatgcttggaaacattaccctggggtgtgtgagagcgtatgagaagcatgtgtatcacatcaagttctaaaacatggggctgggattgtggtgaaactgagtagggaagaagactggagaaattatggttgaatctgcaacaaaaaggaacggggagaaataaaacctaaaaaggagttttttgtaagacatatatttaaccatttattacccataatatgaccaaaaatgtgaatatggtaaattgttttcttctgcttctcagaaagcagaaagggaagaaagggagatcattttcctcagaaggtaaattacatgcagttgtctctaaaatctttctattcaaagtgcagtgcaatctttctgaccagttacttcacccctgcggtttggtgggcagggaattgacagaaattgtattttatacttgcagagtgcttttagaaagtgataggtctcagttcaagaatcagaatgagataataagaaacagtgattgtactatttttgttccacatcctacatttactaacagatctaagccaaagggtgtagttgcttataaaatgtaccagcctaaagcaaagacttccaagcataataaagctttttttatagtttaatttaatccttctaggtatttgcctaccaccatgtccaacggaatgtcttttctgccatctagcactggattgcagtagtcaagtacttagaaaagaccttcactttgtaatcttctggagcatcggacagaatgctaatgtgcatgttgatcatctaggatcttgctgaaattcactttctcactgagttggttggtggggccagattccttgtttcaaacaagctctccggtgatgccgatgttgctggattatgcactttgcatagaaagattttagaggcaacttcgtgtaatttacgttctgaggaaaatgatctccctttcttccctttctgctttctgagaagcagaagaaaacaattttgcgtatttcacattgttgatcatattatgagtaataaaattgagcctgaatgtatacacaaaagttggcagccatcccaaagatggatttagaccaattccttgcaaaataaaaaaaagattgaagatagaaatattgtgttataaatcatcagattgtcaaaggagacaaatatgtggtttgttttgtctgatgtggatatatcctgatttcaattatcagttatagcttgctgtgaaaattccatctagtctagtccagatggtctatactgtagtgacccaccttggtgggattctgagagccaccagcttaccaccaggcttactgatttggttagagacctaccaatgctagtatctggcttgagagctaggttagagcagagctgaccagttacttcacccctgtggtctggtaggcagggagtgaccagagatgtgcctggtatattgattagtggtagggcttgaggtggtcagagcctccaggctggttatctctaactattctcctccattagctgagatagagccccaggggagcactatacttagcataaagtaaaatcttgccatggataatgttgagcattaacagaaagatacacatgacagagaagtacatttttcctttcctttccccttccccttccccttgccttccgttcccctcccttcccttcccttcctttcccttccccttccccttcccccttcccttccttttcccttcccttcccttccttttcccttcccttcccttccctttttcctttaccctttcccctttcctgtttgttcatgctttcatttcattggggtataaacctagaagtgaaattgctggttcatatgataatactatgtttaactttttgaggaaccaccaaacttttttatagggatggactattttacattcccgttagtaatgcgtaagagttctaatttctccatatcctcatcagcacttcttattttctatttttaaataatagtcttcctggtggtttgtagtgttatctctttgtggttttgatttgcatttctctaatgactaataatgtttgaaaatcttttcatgtttttattggccattcataaatcttctttggagaaatgtgtattcggtttgttttccattttaattgggttatttgtttttaattttcgagttgcaggagttattttatattcaggatactaccttggtcatgtgtttttattttctttgggtatatatttaggggtggaatttctgggcattaattggatgtacatttaattttatgagaaactcccaaataattattcaaagtggctatgtcagtatgcagtcccacgaggaatatataagacttcagttgctttgcacgcttgtcaacaattgatcttgtcagccttttaattttagcccttatgatgggtgtggaatgatatctgactgtggtatttaagttgcattgctctgatgactaatcatgcagagtacttttcacattcttggtagccattttcttgtcttcttttatgaatatctgttcaagccctttgtccacttttaatttggttgttttttcattatctgtaggaattccttttatatttcaactttgagtcccttgctagataaatgctttacgattatctcccatttccccaccccggtctgtaacttgccttttcatttttttaaatatatatatattttctggacagagtctcactctgttgcataggctggagtgagtggcacgatcacccctcacttcagcctctatctcccaggcttaagccatcttcctgcctcagcctcccaagtagctgggattataggcacaggccaccacacatagctacattttattttttgtagagagggggtttcactgtgttgctcaggctggtctcaaactcctgggttcaagtgatcctcccacctcagcctcccaaagtgctgagattatggttgtgagctaccacacgcagcctattcattttcttattcatgtctttaatgaaatgtttatttatgaattcaaatttattaattttttatcttgtggttagtgctttttgcattctatgtaagaaatatttgcccatcccaaggtcacaaagatttttctccgtgttttcttctaggatctttatgtttctagcctttatatttacatccttgagaaatattaagttagtttctgtgtacgaagataggcagaggtagaggttctttttttcctctctctccataaggatatccgttattgcatcaccatttgttaaaatgagttttccccttgatttgtcttggcaccatggattgaattggattgacagtgtatttgtgggtccccttctggaaattctttcctattccattcatccatttgtctacccttacaccaataccactttatcttgagtagctcatgtttttaagcagtaaggccaagttttgaaagtactcaactagcacctacatgttccagactctttagatatgttacctatgaacatcatatgaggtagatactatttcctatcctcgactccccaacacatcgtagttgcagaatataagacaagttgaataggtcacattcaagcaccagcgggtgttgttacaaatcccataattttgctgcctctccagaaattaagtacatacacctttgcagcgcatttaagtgccacctaaatgatcccatcatattgccccagttacatgttttaatggtttctttttttttattatttaccttcagccaacccacaccatgtcttagaggtactcagtgttttaaacaaaccaggtatctcgtggttttctgaatatgtcccgcccttctctgcacatgtgccttggtggcatgcttctttgcccaccatctatagtgcttacatccagctcacatgtatatttccatctcaaaaagtcttcccatcaagctattgcagagcaccacaatcaaatatgatgcctctgctttgcaattcttaaacgccactttataactctgatggcactcacactattctgccttatatattttttttctgtattctcgtccagttttgcccactaggaagaaaactccttgatggaagtgtattcgtcgtctttgtagctattggatacacatttcaacaagtccgagtgaaagaaattttttgagacagccaaataatgttgtgatcaaagttaaagaaagtttaaaaaagtgaacgggttaacctagcatgtgatccgggagaatcccaaagtctattctctcaatttaatccctttaaatatttttttccccaaatcagatctttccagttggaagactctcaggactgcagcagagattttgtggagatccgtgaaggaaatgccacgggtcacttggtgggacgatactgtggaaactccttccctctcaattattcttccatcgttggacataccctgtgggtcagatttatctcagatggttctggcagcggcacgggcttccaggccacatttatgaagagtaagttgtttctattttagtgatagcttccagaatatgtcttacaaactagaaataataattttctcagtaatatattaagcaagaacaatcctaaactctacactattttcctacattgtctttgtgaattaccttataacatattagaaaaactgaattgcatatgaatggctcaataagggcaagggagagcactctcaatggttctattgttctttttaagctctaatttctacctaatgttaaattagtttttttcatgacgttgtgttagagtctggtaatatattatagtttgggtttggtgtatttatatcaagtgtgtttcatttgatttcataaactctacgttcttcacatttaagacatttagtattactttgggattggcttaagtgctcacatataacaacaataggggattcttctaatagtataaaatgttaaatatttttattctctagctcaacttttccattattggctatttcatatgtaatttcaaactatcagtttttcttgtaaatttctttaaatgttccattcttttgaaaaacaaagtaaaatagataaaccaaaattagagagtggggctgctcaccccaccttcccatgtccccaagtcccctaggggctcagaaccccttttcacatgggaagttgtggcctcttttcacaccatgcaacgttttaaggaccttttctaaggaagtgatagcccagaaaccaaaaaggaggcagtatttctttccctagtcagaaaagaaatcacagtcaattaaaagtccatccttttcaacaccctttgccttttgtttttttcatttgattaaagagcaattctaagtgggtctgatttactactctgtcttccctcctagtatttggcaatgataatattgtgggaactcatgggaaagtcgcctctcctttctggcctgaaaactacccacataactccaattaccaatggacagtaaatgtgaatgcatctcacgttgtccatggtagaatcttggagatggacatagaagaaatacaaaactgctattatgacaaattaagggtgagtttccacatgcaatcaatgttcataaatattggtgaattgctattggtaaaaataaatccaaggtaacgtctattcaagcatttgcaaatcatgtgggatagtctgctctaaatcatgtttagagcagactgcctctagattacatggacaaaggcaatttcagtattgtatttattattttccatttcatatctaaggggttttttaggattattataattttcctgttgagctttgtctaagcatgcatgtatgtcctaaataagtatttattctgtcttatttcctactatcctctttgtttttatgttagagtattaaaaattttaatgatcatataaaaataaatataaatataaaaatcatggtgatcattgctatccagacattggctaccatatcagttccagaaacacaatcggatgcttacaggctatgaccccaccttattcatcttggattcttggtcatgaatagatcccagtgcctgatgggtgcccaatatgtatgggaatgactattacataatttgtttggtagagtattttataataactgttcatatgaatttgtcctgagctatttaaaaattatcacagaatatgcctcaaaataggtaatttgagattttaaaaccaaaggtaggagatttactaagtgctttgaacatggtgagccctacaagttttggctattttgttgtcattaattcttctttccttctgtggaaatatggactcctttaggatacctgtccactttctctcattaaagcttttctcttcttgttattttcccttctttcttcctaattcctccctttgaagccccaaagcacatttattaagtactgttggtaggcaaccatcctggttcctatttttccatccacaaattttactgtaaatcatcttatgagtgattcccacagtgcatgtttattaatataattctgcaacaaagatgcaaatgttttcaaaacattaaattaccttcaataatattttatattctctggcagtatgtgttttaagctaaaattaaatgtttactcatttgtcatttttttgttatgataacattgtaataatataaggcatcttttttattttatctttttatgaagaaaaatatagataatacaatgctctattatctgtttttatgtacagatctatgatgggcctagcattcacgcccgcctaattggagcttactgtggtacccagactgaatctttcagctccactggaaattctttgacatttcatttttactccgactcttcaatctcagggaagggattccttctggagtggtttgcagtggatgcacctgatggtgttttacctaccattgctccaggtgtgtttggtaataaatgaagttctttttaggactgatatgtgcaggccaatgtttcaaaggatcctatcataacaggggtcagatataaaaataagtacagccccaaagcccttccaccatatgttcagatgttgttttaaattcataaacactaccttttgtagaaattgtacgtttctttctaaaaaatgcaggtcccattatattttttatattaattaggggcttgatatccataagatcgtctacttacaatttctagagaccactttagaaatccctgaaaatttgatttgcagatactacacatgtacattcacacacacacacaatcagttagttaaggatcaactcataaaagtaactatttttcctctgcattttatttcaaatgtagcttcagaaatgcttcagtttctccttagctggttgtaaatttccatgtttcaaagtaaaatgggccgaattttaaacttttattttacttttttacattcctaatcccctcagtgaaagtgatattgagctagcattgtttggggagacttttttcttgaaaaatttttaaatgagaccgggtgcggtggctgatgcctgtaatcccagcatttttggaggcagaggtagacggatcacttgtggtcgggagttcgagactagcctggccaacatggcaaaaccccatctctactaaaaatacaaaaattagctgggcgtggtggagcgcgtctgtagcctcagctactcgggaggctgagacatgagaattgcctgaaccaggaggcagagtagagtttgtagtgagccgagaacatgccactgcgctccagcctgggcgacagagtgagactccgtttcgaaaagaaaagaaaagcaatttatttaaatgaatttgagcgtttcttatggatttcaggattgacatagaagaaattaatcagatatttcttggaggatattctaagtccttgaatgcttgattggaacacagaatcacggtatctcattgaagaatattcgaactctgaacttgttctatgacttaaaagattagcctatttgcttctaacttcttatatcagcagaagtcactaatgaagataatttgtacttatatttatttaatgtcccttagtattccattctgaaatgttgttcctacctctctaataaggtgctttcatgacactgaatacaaatctcttacttaaaatattgatctgtctatctaagagcaaagaaccatcagcaagactgacaaatgcaatttagaggcaacatttaaatctggatggatatatccagagctcttagaaataaacttgagttaagctttcttttatatttacaaccctcaaggtagaaaaggaattatttacttgtgtaaaatattataccaacaaattttcttctaatattttattacgaaatttcataattatatgatgtaagtggacaggtgaagaagagagccataaaccttatttttcttagtcaagaagaaaaagaaaaaaggaaagtaaggggtcaagagaattttagagtttactaattatctagatggcataagtgattatcctgtaatgataccacactgtgaaagtgtcattaaaacttaaaaaaccttaatattttgaaatatgtcaacttattgagcattgtcctatcagtatttctttctttttttttttctttttttttttttttttgagatggagtctcgctctgtcgcccaggctggagtgcagtggcacaatctcggctctctgcaagctccgcctcccgagttcataccattctcctgcctcagcctcccaagtagctaggactacaggtgcccaccaccacacctggctgatttttttgtatttttagtacagatggggtttcaccgtgttaggcaggatggtctcgatctcctgacctcatgatctgcccacctcggcctcccaaagtgctagaattacaggcgtgagccactgcatccgtcctgtcctatcagcatttcttatacacacatatatttattttaaatcaacgcatatttattgagaatttattatggatacactgagaagactaagaaaggaaaatgaggtacaatctctactctccaggagcttaaaagtaatgggaaccaggcacagtggctcatgcctataatcccagcactttgggaggctgaggcaggagggttgcttgaagcccaggagtttgagaccagcctgggcaacagagggagaccccatctctacaaaagattaaaaaaattaggtaggcatggtggtgcatgcctgtagtcccagctactcaggaggcagaggcaggggaatcacttgagcctacatgctgccagtgagcagtgatcatgacactgcactccagtgagaccctgtcctaaaaataaatacataaatagtaaaaataaataataaataaaagagattgggaaagaaaaaacactcatatgtgagttaagtaatggtatcgtaattaaatgggtacatgacaaagcaaatggtaacagtagcaaataagcaagggaagaaaaatgagcttactgtggactagggtcaactgaaggaaattcaatgtgtcaagtaggaaaagcagtcagtgtgtcagtcaggaaaagctcagccatatggcggtaacaaacaatttcaaactcttaggtgctgaaaacaacaggtctccttctacatgttcctctcgtgttaactgggtgcctctcatcatccatcacttcctaactcaggctgttggagctgccattgtctgcgatattgcctgagaccatggcagtaggcaaaagagcccttggatgtctcggtttaaaagtgctcactgtaaagtaacacatgccttttgctcatagttcattggccaaaactggtcaaatggcctctctcagccacttgcagaatgcagttctaccatgtgtttggaagtggagacaaaggaaatatttggcaaacagcactaatgacccacagtcattataaccatattttacaaattcaagataagaaatatttcacatagaggaaaaccttaaaatttgaagatactggataacattcagcattcagattttccatgtgaaattgctttaaaaaaatctgtagcctacatagtaatagggtaaagaaatcaggacctagttctacaacattttatattcacttcctgttggccctgataagattcaaacatattatggtgtacaagttgtaaacttctgaaatggtgaagattggatctctgaaatatattgctacataaaagtgatggcaaaaataattgttaaaatcaactttttgagaactctggaaatagaccaaagccttatagcaatctgcggcatatttattcaagaaaaatcactgaatctaagtaagagtcatttttgtggcattctcttcctattcccatctctctctctcctcctagctttgtagtagcctcatgaccacagtagctgtgaaaatgagcagctttaacagctgtgggtggtggggccgcagaggtccagaaaacagcgcatctcctcagcattgccattattccagttcagcaacttcctggaaaactgcattctcaggtcttgtcttcacaggacctgggcaagagctcactcttttgtaaacagccctgtccctggggtctttgccgaaaacaatcagcaacagctgtttcacatcacaaccgtgcaaggcagtgacaccagttacagctaatgagaaactgaccagtaaacttgaaaggaaaaaatggggaaggagatgcccactggggctttgaaaagctccgacatgtttctggaaatctagaaggccacacacatagcccagctgtgcacatgcccaaaaatagaccccgagaaggacctaatctgtcaactcaaaattgcctagatataaattacaaaagtaactacgcaaaaatgataaagaaacatgagaaacacaggaatgaatacagttctacctcagtaatacaggggatcctctacgtgtctttattgatgcctaaatagtcagcacttgatattaaatgggttatatagcaaaattatggtgaaaatggagaacacaatgcattttttttacatcaaagatcaattgcggaaattgcagctttccgaatcagtgggttacatacgatattcattgatttctctgagaaattgtttcaattggttgcttcttttcagtagagggctgtcactttcaagtgaaaaagtgctagctagcgtcttttccattagggctgtgtcaaagatgttgctttctattctacaggtgcttgtggtggcttcctgaggacgggagatgcacccgtgtttctcttctccccgggctggcctgacagttacagtaatagagtggactgtacgtggctcatccaggctcccgactctaccgtggaactcaacattctttccctggacattgaatctcaccgaacgtgtgcctatgatagccttgtgatacgagatggtgagaacattataaagaatgctgagtttcaaccctgacacataattagttctagtccattatcatcagacttgcatactgcctccatccgtttggtttggaattacacagatattatggtcaaggaaggcatcagtaccagaaatggctacaacttctgaaggacatagaaagtattaaattaccggtcacagaatatcaggaatagcacatttctataaggaaaaaaggcttttttagaggcttaagaaggaaagaatagtctgaatgtcaacattgttcacctgtcctattgagatacctctgagataaatattgatattttatgtttctggctgaaaaaaatacttataattgtaatgtgactggacatagtggttcacaccataatcccagcactttgggaggtcgaggagaaggatcacttgagtccaagagttccagaccagcctgggcagcagaatgagaccctgtctctaaaataataataagaagaatataaaatagtaatgtattcatttctctttgtcccctgaatgtgggtagaataggtagagttaaggggtgatattgttgtattctttcctttgtacacaggcatggtgttgctatgtgacataaagttagagacataaatattgctgatgtatgccttatacaaaattgggcttcacagtctgcatggactggaatgaaggaggacagcagaaaggccacatcctccacgtcagtatttctcagtgtggcccccagatccacagcatcatttgttagatgtacatgttctcagcaaaaagaaacgtgtttgtctttggcccacaggttgctagtgtgcaagatcttgtctcccttatccctgatccctagacccctgccgagtgagaaaaatcgaatggtgaaggtgctttatgtcccttctgtagaggcagaacactaagtagagactcaaatcaatcatacacacatgatgagatgtcaaagcatgacactccccctttttcccatcagcaatcggctatcagcacgttgcacagaggagtatcaaagcaccagaatgccctcttcacatctaagccttcctgtgcatactgaaatttaaaacttttcatgtaatggaaaggatgtgcatccttgcacacatattctagtgttcagaacctactagaagttttaaaaaatatctttgaaaaaaatcttaagtaggtaactgcatctatgaagtaaattatggttattcttttaaaatcacattccattgagttgtttttgttccatcactaacttctcttggaagcagagagtctggggagcagtccttttttcctgtgtggctttgcacaggtcacaaagtggctccaaacccgttctacctgtgagatagacaaatacctccctcacaggctttttctgaggattaaggaaagtaataaatgaaatctttttagcaaaagtacaagcattttgtagatgatgaatttggaatagtttagatttcagtttacttagatggaaatttctaagagaggtttaatcagtgcccttgctcaggcacagggcggcttgaaagagctaaagaaactcaggtgcgtgccaaaacaacacaaatgttttaaagtggttatgcggcctttccgtatggattcctttttatgcactggcaatgtgagtagatgctcaataaggttccttccttcctcatttgtttaattatttattcaagaaatagttattgagtgcctggtctgtgtcagttggtgagtattgtagtcatttacacattgttaatatatttttatgactaaatttgatgtttttttttttttgagacggagtctcactcttttgtccaggccggactgcagtggcgctatcttggctcactgcaaactctgcctcccgggttcatgccattctcctgcctcagcctccctaatagctgggactataggcacccgccaccgcactcagctaattttttttttttttgtatttttagtagaggtggggtttcactgtgttaaccaggatggtcttgatctcctgacctcgtgatctgcccaccttggcctcccaaagtgctgtgattacaggtgtgagccaccacacctggcctatgactaaattttaaatcccacttcaattatttgttctttgcccagccagccttttgcttctgagtagcagaagcatgtaacattctgaagcaaatatctaaagccaactggccacagacaaagatacttataggctattcctgctcatgcaattggcctgtcatcacaggcctttggccgtatggaggctgtgaaccttcctgggctaccccagagagggtcatgcagcattcttgggagaactgagtcactgtcccacctgcttattcattttatagagttgccatggttcaaaatgaatcagtttcttccagaccacgcatctacccattctgtataccaaagatccctccaaactgagagtccatgaaactacattggtcctagcaaaacttttaaatagaaaagaaattgtataaaaaaatcagtaatcctttaatctagttccagatcttaagtgtactttcttcatgaccttagataaatcatttaatagcatggttttggggcatctgaggttaatctgcaaaggttaacatcactgttaacttctatctctatgcccttgcatacagcaaagtggcttgtaactcctgtaagattcagttcctcatatacaaaatggggataaaaataaatgcccacctaatagtgtcactgtgaacataaaatcagatagtacatgtgaagcacttaaaggggtatatactaattgctcaataaatgtcagtcttgaataatcttggggcctcagtgtctatatctgtaaattgaagaggttggactagagaaagaattgccaagttgccttctagtgctagcctttactgttctttgacttcccctcctctttaaagattaggctcaagattaggctcaatctttctgcaatctatatgttgaggttttggaaggctccagaaataccccagtactcagtatgaagactgaaggggtggatgggcaagtaacaaaccatctgtgatttttgggtcatcttcccactaatgagtaggctaatcaacaagcacttattttgagataagcattgtttcaccagatgatctggagtgaattttagaaaagaaatcaaaatcaatagactcaactcactttcatccagtgataaaatatacacgtgaactaataacatataataaacttcaaaattttgtagtacaggtaatcagagaataagtcaacaaaaaataatattgggtgaaatgtgtagcaaaatagcataatgaagtgcacttactataaatgcaaaagaactataagagatacacttttgaattataaagaatgcaaaagtttccagcgatcagaaaccctccaaagaatgccattttgagcattttgtatttataactctgccattacatttgtaatcacaagaatagaaaataacttattttctaaagtggttaataatgaatgagtttcaagttgtagtcagtgccacaaagaatccatgtggctggttgtataaaagggcatatttactcatgtctcatattctatttttgttttttataaactcgagatttattaattctctgccttaggacaaaagagaaaaaaacaacatattttcccagccacggcatccaagtctgctataatcccctttgctccattttggtttcagccggcacaggggctttgatcaaagcttatatccaagataatcaagatgaaaggagacgtgtggtgcccctgctgtcctttgtgtctctgtgggggtggggcacagttgctggaactcttctctcaccctccacacaaatgtgtggttgtttttataccaaaacaaacaaaagcaatgaacaaacacagatgaaaagttttgtttaaaaaaaccccactggcactgaagaaagggcacatacaattgcataccttttggtgaatgatattgtaacattagtgtaggatctgaggtcaaagagccaactgttttttttttttcttttacctacttgaccttcagcaatcagagtaactgaggtcagagtctctaatcgacagacatatcatcactgggtctccatcgcttcccaatcccaggtactctgattttgagttttagtgacagggagaactggcagccagtttttagaaagacggtggaaactgtcaaagacgtctttatcaaaaagggtaaagaacccagcactttgggaggctgaggagggcggatcacttgagatgaggagttcaagaccagcctggccaacatggtaaaacccctgcctctactaaaaatacaataattagtcagaagtggtggttcacccctataaaaccagctactcaggaggctgaggcaggagaatcacttgaaccccagaggcagaggctgcattaaaccgagactgtgccactgcactccagcctgcgcaacagaggaagactccatctcaaaaaaaaaaaaaaaggggggggtggggtggggtgggggtaaagaaaagggcaggaagcaccattgcaagctggagccagaatgatatcacccctgaggggtccttctttttgaggatcccattatctcctacgagtcctgatgttctgagaaaaatgtgtgagctgctttggctaagctgcaaatgattgtagagtagattctcaagatgtattttcatgttgttccctttctttcaacgtaggagataataacttggcccagcagctagcagttctctgtggcagagagatccctgggcccatccggtctactggagagtacatgttcatccgcttcacctcggactccagtgtaaccagggcaggcttcaatgcatcctttcacaagagtaatgagttcaaatattttttaatcccatgttatctcatctcctctcttttcctctctctttctctcttcctaatataatgtttttgggcaccaggacacaagacaagtcagaggacatgggtctctgcccaggctctggatggctggctccccttacatcagtgctgagtcctcatccaaagcactggggccaagtcgtacaaaagtgtgctgccttcaggtctctggtgtggcatcttcgctccaaaggaggtgtgtccagggaatgcatgagagagagctttaaagcaatttttcagcctagctgagggctggaactagatagagcacagctcatatccataactcatcgaaggagcaaaacgtcatcatttattctcataaattacttggttgaagtcagccatctgagggttggcaggaagagtttgttgctcttgaaatatgaatttgatgagtcaaaagcgggcaccatatatgggataccatcatgcacagtatgattgagacttttcaaacttgacatgtgaagtccagtaacagccttaaatccaaactaactgaaaggtgataaagtagtccaaggaagagtgaaagactctcatgttttgatcaaaaaacataattttaaagtagattctcaatctaacattaaaaattaatctaatatttcctccatgcttatatataccttttataaagtagggagcaactgaagataagttgtgttcctcacgctcaagggaggcaggctgcatagtggcttaagagcatgggctttggaactagacctaagatacattttcacctctacaatttaactagctgtgtgagatgtctgcccttactgatgagcttctggtccctgacaactggagaattaatgcctcctccttttatcctcttcctttatctcctgccctctcactctcatgtatatattactatgtatcgcaactcattatacatacatacatgtatacacatgtatgtatatagtaagggtggaaccattggaattaatatgtgtgtttatatatgtatataatatatataaatatgtgtgtgtgtctatgtatatatacatacttggcagctcccggtctagaatgtatttcaaatttaacctgtgagtggtataatggactttggagactcagaagtggggaggatgggtggggtatgagggataaaaaactacatattaggtgtaatgtatactagtcagggaaccagtgcactaaaatatagacttcaccagtatgcaattcatccatgtaacgaaaaaccacttgtatcccaattagactagatagatagatagatagatagatagatagatagaaaaaaaaatttcacctttgaaagttgaacactttattcccacccttttccatgccaccaccccccaattctacactcctcataatctcagcaaatggaaagtacatttttctcattatttaagtcaaaatcttgatgttatttttgacttttctgtttgtctcacacttaaccatcaacaaatcacactggctctaccctcacaatgtatctagattccaaccacgcctctccatttctgttgctaccagcctagcccgtgcacctatcatctctccttggcctcaggcggtcccctccttattggacactctgctcctgtccttccctgtcctccaccccttacagtctaaggactgcacatagagtgacattttcaaacttaagtgagatcatgccattctgatgcccaaaacccttcaacatcttcctcttcttattcagaataagtcttttcagtttcctgcatgacctagccatgctacctttggaatctctcattctgcctcatccattctgacttccatgatgtacctctaacacatcaagcctttacactgttttctgaactggaatgttttctcccccataactatctggcttgatccttcatttcattcatgtctctgctaagatgttactccaatgacgtggcttttctaacttaactctaacaataaagtacccttctccctcctctcatccatttttctttatagaatttatcaccatctcacatatcatgtatttgtttattgtatgtcttccccatctataaagaaatctttatgaaagcaggtaatttgtcttgtttacttacctctgtatcccagatctcaatgaccaccacaaactgagtagccaatagcatgtgctcaatacatgcttgttatgataatcatttcctgcactctggctttattttcaagcatttttattgcctccactttgaaaaccccccaagaaaactaagaaagcataaaaatccagttgccaatgctatttaaataaccgacctttgtttctttgtgggaaggctgcggtggatatttgcatgcagacagagggatcatcacgtcccccaagtatccagagacttacccatccaacctcaactgttcttggcacgtcctggtccaaagtggcctgaccattgctgtccattttgaacagcctttccagattccaaatggagattcttcttgcaaccagggggattacttggtggtaggtcttgctgctaccctttctaattacattttccatagacttcattcagaaaacaaaatgataatttttctctcctgggacataaatggataagaattgcgtactccttcttttgcaatgtaaaggagttgatgaaattttaatttgtctttccagctaagaaatggtcctgatatctgttctccacccttgggaccccctggaggaaatggtcatttttgtggcagtcatgcttcatcaactctgttcacctcggataatcaaatgtttgttcagtttatttctgatcacagtaatgaagggcaaggatttaaaatcaaatatgaggcaaagagtttaggtaagtattttcactgagaattatatctgcttttcctgcaattgcttgatcttctttgatataaaattttcttttctgaaccaacagtaatagaattaataagaatgcctactctcaagtacttattatatttgatacattcaatatctcatcgtgactacttttcaagtaaagtatcattatttccattttaaagataaataaaatgaggcttggacttttccaaggccacatacctaattagtgaccaaagtgaaattttccatgagtataaaataaactattcttcttgatccctggaattccttagacctttccattataagatgtctaattgtaagttaattctagttacagaaacattataagacttacatttgccttattttgtaataatttgtatgctgttttcaaaagaacacataattttttgattctattattactgatttaattatatattacatgatatctgtaattgcttgtacttaattacacttgattataattgcatttaattctactgtaatgatttgattttgatgacatttgctttttagtaatgtttaattgaataaataaataaataaataggcatcacttcaaaaaaagggagtaatgtcagtagaaagtaatataataataaatttttcctttgtcccaccagaagttagataatatagatttcaaaatgatcctatgacttgaatcccagattcatatatatatatatgtaaatgaaatcatatgttttattgcacattgtatgagatttaaagtcaacatggtttctttattttggtaaaagagatgaataagagtcttcaccaactgacacacaaaaataagcaaatagcttgagtaaggtccagaacaccagggaaggagctttggtcacttcccagagctctggcacaaggagggagctttaatgcagctctgtgggcacccgcgccattgctttctaagctgggaccttctcatccctccatctcttgatgctgagctttgcagctgagtcatgaatgggcagttttcacctggtaccaaagcatttcaagagtagcagtgtcctgagtctagtgagtagacgtcagcccatcctacccatcctacataactctactcttttgtttttgtttataatagactcagtcttttttttctttcttgagacagggtctctctgtcgcccaggctagagtacagcggcatgatctcagcctactgcaacctctgcctcccaggctcaagtgatttcctgacccagcctccctagtagctgggattataggcatgcaccatcatgcccagctaatttttgtacttttggtaaacatgggatttcaccatgttgcccaggctggtcttgaattcctgagctcaggtgagccacctgccttggcttcccaaagtgctaggattactggagtaagccaccgtcctcagccaatagactcagtttgatttatatttttaaagtcaacatttagtggtaattcagatacactaagagatacactaagggtgtgtttgacattgcacctcttctattcctttgtggattcactgttcatgcaagtatggttatggccattactttctccctgtctttcttgaagcttattatgactgctgttaacatcagacttaaaagtcttttgatttcacaacctgttcttggcaacctgaaacaacagcatcactgttatttctctctacttaccaactcaagattgttccataactatagccagccttctacttcccacgtctatctggctatcttcccaccatatctatttccatgccactcccacttctcagcctttaacctaggtccttttgtgaacattttttgacatcaaatcacctagttttataccatttttctccagagacactccttcgctatggttgattgagatttctaggaccctgtggtagatgccttttattctcacctgattaataggcctgttaattaattagtcaaacatttacaaggtgtttcacatcatgcaaaccaccgagttctgccaaggagttcacagtgtggtaaaggagacagacaagcaaaggcacaattagaacatgatataaggctgggcacggtggttcacgcctgtaatcccagcactttgagaagccaaggcaggaggatcacttgagcttaggagtttgagaccaacctgggcaacatagaaagaccttagttttcaaagtagctgaacatggtggcgcacttctgtggtttcagctgctcagtaagctgagttgggaggatcacttgagcccgggaagttgaggctgcagtgagccacgatcataccactgcactccagcctgagtgacaaagcgagaccctgtctcaaaggaaaaaaaaaaaaaaagaacatggtatatggtataataagtgctagaaagaggaatgcacagaacagaaacacctacttcagcccaggacatcagagagggttccaggggaagtggatgaagagatttgcccatcagtgataaaaagatgtgaatgcatagaaaatctcaatgttacaagtcatattcaataatttgaaagaattcactactgctagagatcagagtcaaaaagagataaacataatagtgatgaagcaggcaggaatcactctgctcagggccctggatgccaccctcagttagttaagatgttaatcaaaaggttatgggaggcattggaagtttttgctccaaagcctgaacagcgtgatcagattaaaaacactaatgtagctgcaacactgaaaacattggagatggggaaggctgaagagagagagaccagatgaaagagtaatttagggaaaaaatttactccctgaactaaggcaatggcagtaagaaggtaggagagagggcatatcaaagatattataaatacaggattgagtgaatttggcggtcagttggatgtgaggcaggagggaagggatgggaggagccttaggagcagttgttaggtttttggctgggtggatccattcttcccacagacatttatcaagaactttccatgggacagacactgtatcaggccccggggatgtggcagtaaacaaacaaaatccatgtcctcatggaacctaattctagtgttaagatgcagacaataaataagtaaaatatataatatgccatatggtgaaaggtatcaaggagaaaaataaggcagtaagagtggatgcagagtgtccataggaagaggggctgatgctgtcatcagcagactcaggtatggagctctggatgacgagcaaatgagaatgttcatttgagacaagttcagtttgaaatctctgaattacctccattggagatgcccagtaagtggtcggaacaggaatctcgaggtcagaacagggatctagactgaatctgtaaatacggaataatcaacagactgcttatcatttaagtcatgaggatgtatgacagcaattggggaattattcagagtgagatgaaaggcctacaggaggattcctgagggcctccagcaatgtcagggaagccctggagagatgcgcccaagggccagaggaagaatgacatgaagagtaaaaggaggagaagagcttggtgtcagaagccaagggacaaaaatgtaaagaagaacagtgtgatcaactgtgttaaatgctgtggatataaaataagaatttaaaaagttctttgggcatataactgtgaggtgacttgggagaacatgagtgctttcatagggttgaagaaggaagggcaaaaagagagaaggagagagacagacagacagatagggagagagagattaaatagggcaagatcctggaggagacagtaggatgggaacttgatccagagatacaggaagttaatgtacagagggaaaaatagagtgtagagatgcagattaatttattgaggatagtaataaattaggggtaacaaatggaagagattctcatctgatttcttctactttctttgtaaagtggagcctaatgtaatgtgcttagaatcaagaggaaatggggaaagtcaagggcttagggagtaaagttccaaacagccattgtagtttatatgaaaagtaatgggtgaattgcttggctgtgttgagatgggagaacatatatttgcaggggcatcaatttccatgaatgaatggcttgaattgaacacaaccacggagttggtattttgcaagggaagtttgaaggaaagacacgaagcgagggagttggagctcatcaaagggatttgcaatttagagtttcagagatgggggagttggaagtatgacagaattcaggatgtgactgtaagtggatgagtgacagtggacacaaatgttctagagttgagcagatcaagtatgtgtatggctaagtgattggacaggttaatttcattggcattgtaagtacttttactcctatctggtttgtttgttgaaaatgccaaagaatatttattgataatagaaaaatattttttgataatgctttggttttttagaaaagaaatattaaaaagctcctttatcctctggcataacattactaataaattatttcattccattgatcttggttctcaaatgcatctaaatcctgaagaaatctaatgaatgaatgctccccgagttgtgcaaagatatatctgcttagtcttttaaatataccaagatcatagctctgcatcattctgctgtactgaatgctcagtgggaagctgtaactgctagcatacttacatgcttatcgaagtggtggatatttattcatgcttctgtgatgttctgccccgtgcaccatgtgccataatcatttggttggctttaagaaagaatgaaatttccaatgagaatagataaatggtctggcaaaataaaaagtgtcacacctcgtagctccctcgatagcaaattgagaatttgtttgctggaaaagaaaatgaggatcataacagatgaaaggaaatggagacaaaatacagagaagtcgactttaaaagatgatttgtggccattgactgcatccccttcaccagatcatagactgatttaagtgtgtttgctcacagcctgtgggggcaacgtctacatccatgatgctgattctgctgggtatgtgacctcccccaaccaccctcataattatcccccgcacgctgattgcatttggatcttagcggctccaccggaaacacgcatacagctgcaatttgaagatcgattcgatattgaagtaacacccaagtatgtcacttccattttcatttttttcctaccccaagttagtattttttaaccgtcatgtctcaaaacagtccatttctttcagtagcacatactgcaaggaaatctaggggaaaagggaaatgcttaatggctcaggcctgaaaacacagtcggccagccactctcccatcagctgagccggttatgtacgtggatactgtcccttgtgaccctagacacttcctgcaagggacactgagggtggctacttgagattgatgttatccattcttcctcccacaggaaatatatcatgtttctgatagatgaatatttatttgaccagcctcatattcggtgtcacaaatgataaaatgtctgtttaacaaatgggaatttgtgtggtgtgtcaccaggggtcagcactgtcggaacagtactaaagcatgcacagtataatttctcagtctttatttaataagagttctgaaaggattacaaaacagtaagtcttactatgttgaagagaaagaaaaactatattgatcgtagaaaacatttttctctttccttgaacaaaagtatgtatacatttgcatgaatgcagctgtggtgcaaaacttggatataagatcttctgttgctatttctggcactgggtctaatactacttttccactcatggagcattaattggctaatgtgacttcctgaagaaacgttagatacatgcttatctacttttatggacacagaaaattccagttgggacgctccattagtcccaattacagagctgttagagaatttatctttgtcctgtgaaatgtatcaagtcattgtgtggaacaaaatatttgttgttttttgaaattcctagggactaatttgaaagcaacatttatgtttgtaaaaccaatacagaatatggaagggaagtaaatattcttgaatgtagaacatgtaaaacctgtcttttgagctactaataaaagaatgtattattaggaaaaatatcatacagcattttaaagtgacatggcttatgctgattctatcatagttttttatgctaagaaatgatgatttaataatatcttcaaagaaagtaagtaaggttgtcattatcaaaataagcatctgaccatgtaaatttaacagaattttgttcccacttcagctgtacttccaactaccttgagttgcgggatggagtggattcggatgcaccaatactttccaaattttgtgggacatctttgcccagcagtcagtggtcctcaggagaggttatgtatttgagatttcgatctgacaacagccccacacatgtgggattcaaggccaagtattctataggtaataatttttttaaaacttttattttaggttcaggggtacatgtgcagatttgttatataggtaaattcgtgtttgggggtttgttgtagagattatttcatcagccaggtactatgcctagtacctaatagttattttttctgctcttctcccttctcccaccctccaccctatcaaatgaaagaaaattccgtgctcatggataggaagaatcaatattattaaaatggccatactgctccccaaaatttacagattcaatgggattcctatcaaactattatgacattctttgcagaactagaaaaaactattttaaaactcatatggaccccaaaaagaacccaaatagccaaggcaatcctaaacaaaaagaacaaagctaggggcatcacaatacctgacttgaaactatactacagggctacagtaaccaaaacagcatggtactggtacaaaaatagacacatagaccaatagaatggagtagagagctcagaaatacggtctcacacctacaggcatctgatcttcaacaaagctgacaaaagcaagcaatagggaaaagattccctatccaataaatgatgctgggagaactggccagcagtatacagaagattgaaactgtaccccttccttatatcatatacaaaaattaattcaagatggagtaaagacttaactgtaaaacacgaaactataaaaaccctgggaaacatttttatattaaataagagttattatagaatgaatatgttaaaacttttttaaaaaccatgactttttaaaaataagtctatttgcctaattttaaaaatattttaatgctagaaataagtaaggagtgtaaatgtttgaaactacagtcattaatcaactttaatttctcttttaattttcattttaaaaagtaatcttagtaaacttaaatattttatattttctctaacttatttgtgaagaaatatatgtggttaaatcaaactcctgtttcttcagcttactatgaaatacagtagttctctcttatccatggtttcatgttccatggtttcaatgcccttggtaaacagaggcccaaaaataggtgagtacagtacaccaagatattttgagagaccacatttacataacttttctaacagtatactattatgattcttctattttattattagttattgttgttaatctcttatgtctaatttatacagcaaactttatcataggtccatatatagagaaaaaaacagtctatatgtctgtatagggtttggtactatctgaggctttaggcactcactgggggtcttggaatgtatcccccaaggaaaaggaagaaatgcagtatgtttattactttaagtaataaaaccatttaagaaccaggtaactctatttagcacagtgtctttgaattcctcatcaaatataaaataattaaccttttttttctctgagtctctagtgccaaatcagtcactggataaaaagcaaacatgtcagtggggcatggtggctcatgcttgtaatcctagcactttgggaggctaaggcaggtggatcacgaggtcaggagttcaagaccagcctggccaagatggtgaaaccctgtctccactaaaaatacaaaaattagccaggcatggtggtgggcacctgtaattcctactactcaggaggctgaggcagagaattgcttgaacccaggaggcggaggttgcagtgagccgagattgcgccactgcactctaggctgggtgacagagcaagactctgtctcaaaaaaaaaaaaaagaaagaaaaagaaaagaaaaaaagaaagcaaatatgcctcttcagcattttgatttccttatttaaaaaatgagcggttgaagattcactataatatggtcacaatagcacataatttggtatctaataggtttagacacaaaccaaacaaatatttaataccgcgaaagttcagaaagcctagtggtaacaatgtttaactacaccatagatcgtgttatatcctgagtcaagctgcatataattcaattagctatcacacccagctaataagacataattgaatagtaattttcaaggccctgagatatcagttactgtagtgaactgtttagttgagagtaaaactaggaatggcaggtgtccccacagtaccccttccagctgagcttgggttcagtctttaggatcaacacagggtactaggcaggccagatcagcctatcagttggttcttgagatgaaacttacttgcgactattagctcttacatagtgtcccaaaagaattaatgtgacattacagaatattccatttagtcatcatcttctgtttcccattattgtattggacttgtggtatcatttctgtttacatcaacagtagaattcaaataatgaggaaagcactaaccgttttcagaatttttaaaacttcaattcagagtcacttggcacctaaaagttttcaaatgtgctggtgaaatgaagaaaacaaaatttgtaatagaatcaatctttcttgcttgcttgctttcttatttatttatttatttttattttttgcagctcagtgtgggggaagagtaccagggcaaagtggtgttgttgaaagcattggacatccaacacttccatacagagacaacttattctgtgagtggcatctccaggggctctctggacactatctcaccatctcttttgaagactttaaccttcagaattcttctggctgtgaaaaagacttcgtggagatctgggacaatcatacctctggttagtaaaatatatctgctctcttttgggtgtttattttcacatgtacttattcagcctctgaagtttcttcacttccaagaaaggcaaaagcacatctatactctgcagagaagtgcagactaatgagctttgggcagtactggtgattctctccctcaattctaccattaacaatggatgcccagagcccaggtgtcatatagcccaccctggaggccacttggggagagcaacggtagtgggaaggcacctcttgctgctgagacatcccattgccacatgccgttatttgaggggtgttctatagcttgagatggggaagggatcatgcatgtctcctagtggtagcataaggcagatacttgtcactgttgtctcagatcattttttcaaccaaatgagcaagccttcctcattgtgctgagatatccttcccctaattggttgcatttttttcacttcttcatgtatttgaatatgttcatttttattcatgttttcctgttgtcttgacagagattaacgtttcttcataggcagggtcttgttttttattattttctttgtacacacaggacaccttgaatagagggtaaaggaaatcaatcacttggacatgtatatttaattatttgtctctcacaggaaacatcttgggcagatactgtggaaacaccattcctgacagcatagacacttctagcaatactgctgtggtcaggtttgtcacagacggctctgtgactgcctcaggattcagactgcgatttgaatccagtatggaaggtgagttcattgattcattcaacacaacattgagcacctgcattggacagacactatgctaggcaccagtgttaaaatatttgaaaaacaaaacaaaacatgacccctattttcttggaccttaatcagaaattcacagtgataaatgaaaaattacagctgtgatcaatgctataagggaaaataactagtatcacgagagagataataagaggatgagagttatactgtaatgcccaccttaagagagtcctgtagttactcagaatttgtcttactgcaaacccaacaaactcaaatgaaataaagatcttgttcagaaaaactgggtacttaacattaactttctgattttcctcttttttttttttttgtgaacatggggtcttgccttgacctcccaaagtgttggggttacaggtgtgagccaccactgctggccaattttcttgattcttttttttttcttttctgagacagtgtctcgctctgttgtccaggctggagggcagtggcatgatatcagctcactgcaacctctgcctcccgggttcaagcaattcttctgcctcaggctcctgagtagctgagattacaggcgcacgccacgacgcccggctaatttttgtatttttattagagacgggatttcaccatgttggtcaggctggtcttgaactcctggccttgtgatctgcctgcctcagcctcccaaagtgctgcaagtgtgaaccaccatgcctggcccgattttcctgattcttaagttcattacattcattggtctctcatttcttgggccatgatgataactaaattgctgcctgtggactatcacccatggaaggcagggttaaatattaatagagataaaaaatgaatgtatatgttcactaaaatcctcatgcacataaataaatatggagactaattttatctagaaggataatttttaaatacctgaattttgagagctttcttgatggaaggaaacattttgatttgattgaaagttttcttggctttttccccacgtcagagtgtggtggggatcttcagggctctattggaacatttacttctcccaactacccgaacccaaatcctcatggccggatctgcgagtggagaatcactgccccggagggaaggcggatcaccctaatgtttaacaacctgaggctggccacgcatccgtcctgcaacaatgagcatgtgatagtaagtgttccctgccgcctgagatgttatattccatcatttaaagagtttaccgacccataaatcatagtcagaaaactaggtcaggaaaattgccatctatgcaactataactcagacaaattctaagtattgttgaaagaacaaaatcacagtaacctgtcaaaataattgtaaaagttgtttgaagagactatcagctatcactctgtgcatcagggtcatagaataaattttaagagtgaatgatcacgacaaatggcaaaaccggagaggctgtgggaagctaagcctacagcagcacacagctgaatgggaccagagtcacagcacaagccaccacgaaagttctgagcaggtgggtggtcctgcataagcactgctctctccaggggtacagagggactcttggtgggagagcactgctacgtgacctccatgtcaccaacctccagtggtttcacatgtgtcttcagcactctcagcttcctgcagtgaaagaaagcaaatgagatccctgagtgtgaataacaaatagattgttaactgtgaagtgctgtgcacacatatgtgtgtgtagataggaagattggattaatattagtaaatttatccacccaacttgccccttctgcagtgtttgttatctcagtaaataattccaaacttctggttgcttgggtcaaaaatcttgatgtctattttggaatccttcctctcacaccctatatggcatctataagcaagtcccattgggtgtatctttaaaaatatccacaattgaactatttctcatcatatctgctactaatacccccaccgttcacttggattattttagaaagttccacctcgtccccctggttccgttctcctctccctacgttctcaacacagcagcatgtgatggttttaaacctcaatcggatcatgttgctgcctttgaaaatcctctaatggcttctcatctaactcagaggaaaatcccaaattgcacctgtggcccacctggctgacattatctgctgcccctccctcttctacctgtttgtcttatctcaaactcctctcttctttgctctctgggatccagccacctggcctccattccgttccctgaatgtgctgagatgctccccatctggctgttgccttcatctggaatgcccctccccagatggcggcctgctccacaccctcacttcactggggtctctgctcgaatgccttttaatccataaggtctaagtaccttatattacagaccccaccctggcctgacccttctctgccatgttgttttgcagcacttcacacctgctgccatacatcattttgatttgttcatcagtttattgtctgcttcccccactagaatgtgagctccttgaggtcaagccacagtttcattcactgctggggattcactgaatccccagtgcctgtacataatagagataaataattgttgaatgaatggatagtagaggtactatcattatcccttttataacaagccacttttgttttcagtttaatcgtctcctgttgggtagtgaatttcaaaaatatgaaatatctttgtatcttatgaccactttgtattgccgtaaaatgatcttattcaaccttcagattttatttccaagttctaatatctgaaggactgaactgttttctttcagatcttgaaaataagaaaccaagtgtgttttcttttatttgagagccaggaaattttggactaaggttgtttattataaagaaacttttttcctattattgattgaattatataaacaaagatgaagtagaaaaaatactaaccactcccactataccacattttgattcattttctcatctcttcttggcaaagcatactttatgtacttgtaatcatgtgatataaatccacttgaattctgattttaatctatttttctggttataaatataatggatgcttattgagcaatatttggagagttcagaaaataaaaaatataaagatatttttaattctactcatgtattactaaaattttgatgtatgtgctaacagttgttttttacctttgaaattattttcatagtttaaatcatactgaatataatgattatcaggaattttacaagcagagtattcacatgtcctttaggaaagagaatatgaacagtcatagttttagatctcaaataaaagttacagtcacaaccacaaattccaaagcagatcttacttgtcatctccctatcccttaattatcaacttataactcttgcagctactgctggtgggttttatgtcattatttctaaataatattcctattctactactccttgctttttttggacattatctatccacatcctactctagaagatgagacttacccctttgccaccacaaacacacatggggtatgcaatgtttatatactttcccaatcgtctcccaaaatacgtatgtcacgcttttgcttaaattgctgttcagttgacattaccatgattatgtaaacaccattcacaactgagccaagtagtgtagtatggcaacatttgcttttgttttcctaaggaataataataattgggtcctctttacattttcttgggttttatgcattgatcaccaattcgtccacaccctctccaccccagatgtgcatctctaccttctgtagtaaaacatatcagttccatttcttttcctcagtaatatccttccttgagcctttgtacgtcagctgcaagcctgatgctagctgtcatttcagaatttccctttgccatcaaatgtgcaagttccttcattcttctcctgggctagagagctgactttgtgatgctatgcacgtccctttcttggttaatttcctcttttggtgaggcataccctcttgcggctccccaaggaaatgggcaagggcaataaatcttttgaaaaatggtatacctgaaattatctttattttaccataaatctttgaaaagtatatatttaaatattttatatgtttgatatattaatatatatgaatatattaataataattttgaagttttgtgttgctcatttggggtcagttttcttcatgttcctatctcctgtttactaatattggtctctgccttttacattagtcacttccctaaatgtctgctgatccttggctattcattcgtatttaagaatgaattactgaaaggatgactggtatctctgtatgcatgagggggccctgactctttagcaaaacctgcaaacctacaaatgtcatatccacaggtcttttctcttggggaggttaaaactccagcgacgaatcactttcagaattaatttttcttctgagtctttagttctaatgtccacattcctttttttgaaatgtatttttatatgttcaatgtttattttggttcctctttaccctgctccaaacaagggcatgtgggttggcctttgcccctactctatttgattgagaacttgccgaaaagaggaagaagaaagatgaaagaggaagaagaagaaagagaaggagaaggaggaggagaagagggagaagaagaagagggagaagagagggagaaggagaagagggagaaggggaaggagaaaaaaagaagaacaataagaaggagaaggagagaagaagaaaagaagtagaagaaggagaaagagaaggaggaggagaatgagaaggagagggagaaagagaaaagaagaagtaaaagatgaaagaaaaaaaagaaaagagtgaagaagaaagaagatctgctggtgcagaggaggcagctttaactttcattgcactgcttcctagctaataccttatccagctggaatgagcctaaaatttctctaaacccacctgcctatctgactctctgtacagacagagaaaataaaaagctatgccacccagtgtgtcctacaataagacctgtgtctgatgttgtccctgctcatagcagatcctaaatctcacgtgcctgcttcctatccatttgtactctgagagttgtagtttctaagtacaaaagggattagaggacaatgatgggaattgcattctggttgcttctaacagcagaagtccatgtgataaatggatgactataacatgttcagtcattgtgattctatgccaaaggcagactcagaggcaggataacagccattgatcacagtttccgacatgtcccattaaccttatggttggttctaatcccttttgattccatcaatgtggtgcccattcctgttttcagcattatagaaatatttttcctcatctgtttctttatgcattacttaatggtttggaatcagagggatggtttgaatcccagttctattattacatcatctttctggattctggtatcttaatctggaaaacagggatactgttatctgcctgggagggtgttttgttgattagataagacaggctgagtggatgataagcaaagactggcatttttgtctgctcagtaaatgatagcaaactcttcttctggtccagtgagccagaagacactttacaccagaagcccccagagagctaaatttgattaattatagtaaatttaaagagatgacatcttggccgggcgcggtggctcacgcctgtaatcccagcactttgggaggccgaggcgggtggatcatgaggtcaggagatcgagaccatcctggctaacaaggtgaaaccccgtctctactaaaaatacaaaaaaaaattagccgggcgcggtggcgggcacctgtagtcccagctactcgggaggctgaggcaggagaatggcgtgaacccgggaagcggagcttgcagtgagccgagattgcgccactgcagtccgcagtcccgcctgggcgacagagcgagactccgtctcaaaaaaaaaaaaaaaaaaaaagagatgacatcttttgttgtggagtgcattctccttctgcataactgttagtgccatagtctgagtcattatttctaatcttgagtcattcaaatccttttaaaaatgggaatatcaaccattcaatcaatgaattattgttcagttatttcatctagattttttttgaactgtgaaaaccagtcatgcaaattcatttgattttataaagcattggaagaatagtttgcgaattattgtaactatgtgaatgactacagctattatttaatattttagagtcaataataatccattattggaaattcaaataagtaagaaaattgaagctttgaatccataactaatgaggaaagaactattatgtttaattgcagatggagattgatttttcaaattacttttcaaagtatttaaaaatatctgcttgctgggtgctgtggctcacaccagtaatcccagcactttgggaggccaaagcaggtggatcacctgaagtcaggagttcaagaccagcctgaccaacatggtgaaaccccatctctactaaaaatacaaaattagctgggcgtggtggtgcatgcctataatctcagctgcttgggaggctgaggcaggagaactgcttgaacctgggaagtgaaggatacggtgagccaagatcacaccgctgcactccagcctgggcaacaagagcaaaactctgtctcaaaaaataaataaataaaaattaaagtaaataaagaaaaatatctgctttattatgtacatgaaatcatcagaaactgatatttaagcttcccttccaagtaacaaatgtcctgatgcattgttaagaaaaactgcccatcagtgagctctgcagaccacattgtaagcacaatggctcatctcctttacattgagagcacagtttccagttgcaaagtgtatagcagcttttaatctatcaccacatggcaggaaggcattactgcaatactttcattctagtgaaatcaccctgaagtcacaaaatgtgctcggggtaacagtggcttgtggcactgcgatagaaacctgcattgttaggtcattcattttggggcagggttcccataaaaggaagtgggtctgggctggaaatatcacctcctaggaaatatgcagtaagatggattgtgtgcctgaaggttaaactctttttccaacaggtattcaatggcattagaagtaactcaccccagctagagaaactgtgtagtagtgtgaatgtaagcaatgagattaaatcttcaggaaacacaatgaaagtcatttttttcacggatggatccaggccatatggcggcttcactgcttcctatacctccagtgaagatgcaggtaatgtaggatgttgtaaatgccccccattttaatcaggggcactgcagatgcccccatctactgccaatggcagcagagccatccattttccctttagtgatacttgaaatctttgacataagacaaacacacataagcagatgaaaaacgcactgcagacagaaaaaaagctttctgatttcagaaagaaactgccatagtgaatttaaaacttttaatgctattagattagcttctagcacagtttcaggtcatgttaccatgagggttggtgacctgttccgtagtccctggtcaattcttttgtgctgaaagaaaccatctacctcctagagggtaacttagtctcagagagtaattaattttgctggggacagaacaggctttattgtttctagtcatctatccacacacatatttccagtgaaaataaatgggaggtttgatttgatatagaatattccaaaattaagcaagatatggcctctaattataaatatcctcctatttcctgaattgggttcaaaattttaaagggttttaaattttagaagtgggagtgttttaaaatttagaagttttaaaatttagaagtgggagtgaatattaaaagaaaaacgctaagttatttcattggtacaagaagcatctgttcctttattaaaagggggcaaattaatggcaaattaatgtcctattatctgtttgatttaaaataatttattagatcaagtggagaattgctaatcaagccattaggacctgccaccattatatttatgtattcctctaaagtaaatattaatgaacagtaggcctcaatatttggacctattgatacagagccaaacgcccaccacttaatctacagcaacaggaaaatagagaagttgttgatttttgcacatctttcctttataaacttgcagaaacttccataatttgcatgccttttacccataagcttgactgcatctagaaaaacaaatcaaagcagtaatgttgatgttttagttactgttcctgtattgtttatctcttccgttgtggcctgaatcttactactactttctctgttgccttctgttttcttagtgtgtggtgggtctcttccaaatactcctgaaggaaactttacttctcctggctatgacggagtcaggaattactcaagaaacctgaactgcgaatggactctcagcaatccaaatcagggaaattcatccatttccattcactttgaagatttttacctagaaagtcaccaagactgtcaatttgatgtcctcgagtttcgagtgggtgagttctatctaagaatgcgttttcccatttatctacaatattctttttatcttttttgttgttgtcgctgctgttgttgttgttttgagacaggagcttgctctcttgcccggactggagtgcagtggtgtgatcataactcactgcagcctcaacctcccaggctcaggtgatcctcttgcctcagtcccccaagtggcttggactacaggtgtacatcaccacatacaactaattattaaaattttttgtagagatggggtctccctatgttgtccaggctggtctcaaactcctggcctcaagtgatcctccctctttggcctcccaaagtgctggggttacaggcatgagccaccacggctggcctacaatattcttcatatgcttggagactactaacaatgaagggagtcaaatggctctaacataggtacacacgatccaaaagaactctgttcgaagccataattctgtgtgtgcccagctgaggaaaacgaaccccaggaacagtgagtgaggcggatcactgtacaactagactctgtgttacagtcacttcgtttcccggcatgtgacttttgccgaagcgagagtccactactatcaagactcctttccaaggagactgggacttagcatgctcagcatgtgttggcagtttcctgaacttccaggatttatgaaggggctgtgaaattctcctgaggccttaggagttaaaagaagttttgcaatataccagatggagaaacacatggaagctatttggggaaataaccccaaagcagtcatttgtcttggttttcgtgatggaaaaggattgcggtgtactcaataaaccataattctcttaagaatttttaaaactctgtattcaaagaggatgaatcaattttctttctttcccatagtcaaggtgtaggttattcattaggttgcttccatgattatgctgacacgtttttctcagtaaataaacaagtagatagaggaagacaataatattgtaaatagtacgtaatcatccatactgtaaaagttttgctgagttctgtgtaatcccaaaatttaaagaaaaggaggctgaaagcagcagaagctcatcagttagttggtggagaagtccttgggaaactgagaggtcaatgttaattacctttgagaacgtgagcgacagaattttcaggaaggagaatttgatagagcctgtacccacgggccaagggcctcagccagagagtcctccaacctctctgaggctgaagagtctaaaaaggcttataagggaaagggaagttgtggtttgagaatgttctccatggaattctgataaaccctcaccccctctgcctgtttcaaaaccaccggcttgtggtcttaagcagaacagctgtatctcaaatttcagtcagctaaatgctgtcttctctttatttgctcaggtttagaggcagttaaaatactatatatcattgatttagaagaccagtgatgtttatctgacagaataaaaagaaagcagataaatgagagctctgttggtgctctgtacatgttcatcaaacccacgaaatgtaatcttcatgaaaaatattaggctcagatctgacagctcttggcctgaatgccgaatatggagtccatttcagttgattgaatatagtgaagaaatctttcaaattttaggcaatgatcactttatcttgaggatatattttatcactgttggtattatatttcttacaccctacaaaaggtgtgtccaaaagtgctattttaattcattgtatctctgtttagatatgctgaaataactatgaaaacacaaattggaacaaaatggtgtccatcatagaggttcatttcaaaattgctttgatttttttgtgtttgttttacccccttggagggactttctgttgcagttaacagagacacacaaatattgtgcaatgtctgctactaaatcagaatttaagtgtgtgtcaatgaatatcttgaaatttgtttttatcaaattcattgaatgtatttctcaaaagctgtatcaatgatggcacttggtatattattttgttcaggtgatgctgatgggcccctgatgtggagactttgtggtccttcaaagcctacattgccattggttataccttattctcaggtatggattcactttgtcaccaacgaacgtgtagaacacattggattccatgcaaagtattcctttacaggtaagaattataattaagatcttgataaaattacttataaagattaatgatttttttccataaagatttcatatatattttgttagatttatttctacatagctattagttttgttaatattatcaatgagattttctaaattacattttttaattggttgtggctgatatctagaaattttataatttgcataatttaaaattattatttaattttaaaattattcaataataaactgcataattttaaaattattaaattttaaaattatccaataattatttaataattaataataataaataattattaataataattattatttaataattttaaaattattttgtaatttgcataattattataaattttataattttgcatacatgtaactttagtccaaagatctagctatcctcttattagttttaatatgttgtctatagattctctttgatctttctgtgtaaacttctgcaaatgttagttctttatgctttcagtcataatacagaatttcattttcttgcatccttttgctagctagggccaccatcgaatattgaacagaaggaatgatagcatcttgtttctgacctggatgtgactatgacattttattattaaatatattggttgctcttaagtttccaataaatatcttttgttaaagaaagtcccttccatccttagtgtgaaaaagctttttttaaatgtaaatgggcataggattttatcagatgattttctgcatccattgagatgattcaactttttctcctttcataagttaatgtgatgaattatatgaaagatttatttctcttggtaaaccatccttgcatttctgggataaatcctattttgtcatgatgtgtgttttatacatataatgggtattatttgctagtgttttgtgttggatttgcatatgcaacattcagagtttgtgctggaaaacccagccctactcttgactgcttcccttggcaatgggaggttttctagtcccttttcacgagcatgccagtttgtttagattcccaacttcttgtaaaagtctcaattccagtcctgccttctgtggagacccagagccctatcttctcctcctacccagtcatcaaaacctcagagcccaaccctgggacccaaacctgcattctttaccctctcagacttcactctttcactttcactcctctcactttgagtacacttactgcttctagattttggggagctgcttttctttccattgagtttgctatgaatcaaaatatgttttagttatggttttatctaacattcctttgtgttataaccaaatggctggttgaagaaggagtgaaattgattatctactcactcaaccatcttgccagttgattttccttcatcagattcaaagaagagtcaggtttcagtaaacagtattatttgtattgaacatcagaccatattattcttcagaaatgtatttttttttcaattttcaattttctatgctaataccgtatggaattttgttattcctaaacttttacccaattttacttttcttctatttaatttcatttattttatacatatatatacataaaatatacatacacaaaaaaatacaaaatatatatatacaaatatatatactatatatacacaaatatatatgtactatatatatacaaatatatatatactatatatacaaatatatatagtatatatatacatatatatactatatatataaatatatatactatatatacaaatatatatactatatatagtatatacaaatatatatatactatatatagtgtgtatatatatactatatatggtgtgtgtgtgtatatatatatactatatatggtgtgtgtgtatatatataccctatatatggtgtgtgtatatatatatatacacactatatatggtgtgtgtgtatatatatactatatatggtgtatatatatacacactatatatggtgtatatatatatatactatatatggtgtgtgtgtgtgtgtgtatatatatatatatatatatatatatatactatatatggtgtatatatataatatggtttttttttgagatagagtcttgttctgtcaccctgactggagtgcaatggcatgacctcggttcactacagcctccaccttctgattcaagcgattctcctgcctcagcctcctgaatacctgggattacaggcagacgccaccaagcccagctaatttttgtatttttagttgagatggggtttcaccatgttggccaggctggtcttgagctcctgacctcgggtgatttgcccacttcggcctcccaaagtgctggtattactggcgtgagccaccatgcctggccttactatgtttttaatcacaaaatctgatggttatgattactacttactttggcattatcggttcttttttttacttctgttttattgagagggttaccaatctcatttcagattgtggcggaatacagataggtgacagtggagtgatcacaagccccaactatccaaatgcttatgacagcctgacccactgctcttcgctgttggaggccccacaagggcacaccatcactgtgagtgctaatgactgggtgaaatgcttctgagacaatagaaccacaatagcctgtcctgcatgaaaatggagctcttttattaagcaagtgattagagaaggctttgattctacaatgagatcactgtttttccctaacattttctcactagagcacatacattggcatttattattcatgaagagtgaaatctcttttttaagcatagggaaagatatacacagaagataattctgcgtcttagagagaagtgtattcagtttcttaatatgtgttgccatcccaaaccagggaaatgtcttttctcaaaatttccaagagaaccttcaataaggaaaaaaaagtagaggggaagggagaattaaataagagacaaaaatacaaattataaaaataaaaacaaaattaaacgatttgtaagggccttatcttcgtaacagttgataaaagctcactgacaaccattttcttttttctcctgcagctcacatttagtgactttgatattgaaccccatacaacttgtgcttgggactctgtcactgtcaggaatggtgggtcccctgaatcacccatcataggacaatactgtggaaattcaaaccccaggacaatacagtcaggttccaatcagctggtcgtgacttttaactcagaccattcattgcaaggtggtggattttatgctacgtggaacacacaaactttaggtaaaagaaatgtttgctccatttgattttctttttagtgatgtatagtatgaactcataatatgtacattttgtacctactttacatcaggcttagttctaaatatttgcacatgtcatctcatgcagcaaccctggtgggataacacaatatcaatacctggcatctctattttgcatgggcagagactgaggaagcatgggttgatcatttgcctagatacatagccgataattggtagagtcgggatttgaataaaggcaattcagtccagaaactttgatctcaacacttcatgatgctgccttcatcggcaaaagggtatggcacaacctgggaatctcaagtaatagaaacatgagttggaatcccaagtgcttgaaaatatctggagcctaaaagcagaatgctgagtggtgagctgagggcaggaaaataagtccacaacataaagagccttggtttatatgttatcccttgaacaatgggaaactgttgaagagttttgaaaacgaaggtgacaagatgagatttgtaatttagaacaaatgctgtagtgaatgggtcctgagtcaaaatatgacagatttcattttaaaagaatagtttttgtgcatagaaagtataaacattgtgaaaattctcagaaaatacaaggacttgtatcacatactttattagggatttctgtaaatcttgtatatcacacaagacaattatttctggtagagtcacagttattatgaagctctttgttgactgagtcagacttcccctggttaacaaccactggctgttattgaagtgagaagggagttttaggtgaatccctgatttccaggggtttcacagcaaaagattcggagaatgcctctttaacttcattttgttttgtatgaaaattctagatttttcttcctttgaatctacataattaattttgatccatcagtcagtttcaatatgaatcaatcagattgcttaataaaagaattttccccaactcaaaatcactttctctagtccagttagagtaacgttgcaaatggagtgtagagtaatattctcatgtgtgaatggtaataaaatacagaacttagcattgccaggttacatatactacataggctcaaagagaataaaaatacagctcttgtttggagacaggatggaaatctatcctctctatggcacggattagtgttcttggttgaattcaatatcattgtaacacaactgtaacagctgaaattttctctcaatttaactcacctttccatttatggagagagcttgctgtgcacctgactggaagatgatcacttgtaaaaaatgatgaattgaaatctcacatttggaaatgttccttctgtagcagtcttgagtttccaaaattactttccttgctgattgatggctttttacatggcaatatttcaggttgtggtggaatatttcattctgataatggtacaatcagatcccctcactggcctcagaattttcccgaaaacagcagatgttcctggacggccattactcacaaaagtaaacacttggagatcagctttgacaacaacttcctaatccccagcggtgatggacaatgtcagaatagcttcgtgaaggttagtacacttgttcatttaattggagccaagttggttttgtgaacattagtgtttaagctagaaatgattcattgtcgctcaaagtaagaaaattttgctgcctggattccttggatgaaaagtgagaaagtgagaaacctcaactgttaggagctagaatttcttttctttcttacttttctaatagatcctaaagggaaaaatgccctttataatatagggcactaccacaggcaaaatttaaagcatgccacaaaaattacggaacgttgaaggagcagctaatgccagccttcaccttgggcattaagaccccacagtctgaaaaaaccgtgagaaagccatgtaaaaatgatgggaatggggcatcaggagagcaaagctctttcaaaatctaaagttataaatgctgctcgtgtggcagtggcttgtcactttccactgacttgtgactatgatgactgtcttagaaattcatttcatctgtactgttttgcatcttccaagttatatctctaaaagtctgtgacttttagagaaagagtgccttatttccactgtgcctttccagtggaaataacactggtcacgttagcccctccattcatgtctgtcatacctaccacctgcatgttcttctctgagctacttaaacaattggcctttaagttattcaactgtagaatgaagagcatgattccttcttcagtggggctgttttaagcattggagataatacgatgtaataacataggtagtgctaagtacttggaatttaaagtcacttgatgagtcaaagtggcttttattgtcagtgttattacttcctatcaactctcaaatgatgttttatatctcattgacccatgcttactgtttaaatgaaaatctcatatgtgtataacatatatatatatatatatatacatataataaaatacatttaatatacacttttcttaatggctttttccatgaactaaatgaactctcttctcatgaaatgaatcaatatcaagtattcagacttaagtaaaactttcaagtgctccagttgtaaaactggaatgtggaaaatggcctaggctcattccttctctggattgaatgggggtccctctgataacatcgggcaagcccaacgctgctgccgagtgggatgtattaggaaccctgccaaaaataagtggccgtgggaagcactcgtcttctcctaatgggcccgagatgcttgtttctgccaagaaatgctgtgtgggtggacggaaccagtaaagggacccagcttcggcaagcagcccccgcaggaagccacttaacacctgtaaagctgagattctctttacccacccagagacaccagggtaggtgggactggaaaaatgggtcccagtcacagaaaggggccagtctgggaagcctctttgtccccacaggccagacctgctcctcttccacccagagacattgaggtacccgggggtattggtaggggaaaattactataccctttgccttcaactgagaaacacacagagtccctcaggtagcaccagcaagaaccagtgagagccccggtagcaccaatgtaaaccaagcagaccagaattccaccacacagattctgaatattgaagagcaactggaactgtaacccacaaaatgtgcaaggcacgtggtaaacataaacagggtgacagcctgctaaaataaaagatttgaataggacccaaagttccctaacataataaatgacatgtcctgggtacaatcagaaagaacacgttgtatcaggaatcaagaacatcacaacttgaaagagaaaagaatcaagtgatgtcaacagtgagataaatcagatgttgaaatatatgacaaggatgttgaagtagtttccattaacatgcttcaacaatcactgacgagctctcttgaaacaaatagaaaatatcagcaaaaaaacaatggttacaataaagaactaaatagaaattatagaactgaaaaatacactaacataaataaagaacatgctgaataggctcaatagtagcatggagatgacagagaatagaatcagtgaacttgaagatagaacaatagaattcacccagtctgcacaataaagagaaaatagactgaaaaaacaaacaaactagatcaacacagacttagggactcatggacagtaacaaaagattcaacattctctcaaagggagaggagagagtgcagctgaaagaacaatcaaagaactagtggctgtaaactttcccaaatttggcaaaagagacacacctataggttcaagaagctgagtgaacctaaaccaagataaacacaaagaaatgtaagttcagacatatcttaattaaacttctgaacactgaaggcaaacaaaaagtcttgaaagcagtcagagagaattgggacattacctagagaggaagaccagttagaataaaagcagatttctcatctgaaaccatggaggccctaatgaattgacaatatattcttcaagtgctgaaacaaaggaattgtcaaccatacattttatatctggaaaactatctttcaggagtaaagaggaaataaaaacttctcatatgaaggtaaactaaacaaaattatcactaggaaacctaccattaaagatggtcaaacagaagttcttcaaacaaaaatgaaattattaaagaaccgtggagcatgagaaaagaaaaaggaaagtggaaaaagcaaaaatatgtgtacatacaatagaatatccttttccccataaagcttgtgaatcatatttaataaaacaagaaattataatgccctctgttattcagtataatgatatggaaaagttgaaaggggacctaaatggaaatcacatttccacaagtggtcagatgtggatggtggtagactactataatcacataggcacattgtcacacacagaacaaccactaccaaaactgtgtgaagaaatgtacagaaaaacgctaatatcaatcaaaatggaatccccaagatatcaagaaaagagaaatagaggaccaaaaagcagataaagtaaacagaaattatataataaaatgtagacacagaactgatatatatcagtataattgtaaatagtttagttagaccaatcacaatacaggttatcaagccaaaacatgatctaagtgataataaactgatttccaattcaaccacgtaggtacatgaaaagtaaaaggatggaaaaggatgtcatgcaaaggttaaccaaaaaagcaggagtggatatatttatatctgatgaagtagactttagagtacagaaaattacaacagaaaaagaggaatcttacataatgataaaaggatcaatccaccaggaagacataatgatcctcctaaatgtgtatgcaccaaacaacagaggcacaaaatacataaagcaataactgatagagctaagaagagaagtagacaaatcttcggttatagctgaggacttcaacactctcctctcagtaattgatagaacaactagacagataattgacaaggatatagaagaactctacaaaaccatcagttaataggatctgattgacatatatatgtgtgtgtgtgtgtgtatatatatgtgtgtgtgtgtgtgtgtgtataaatatatatatgtaaaatacaccacacagcaacatcagaatacacaattttttaggaactcttgtaacattccaaggtagatcatatcctgagacatggaaaaacctcaaccaagtcaaggaattgaaatacagagtgtgttctttgagtatattaaaactgaactaaaaaacagtaacagaatatcttattaagcactgagctgagctggagagaactgagctgccaattgttggagcagctaattaaaacaacaggccaaaatgtaagtaacagtcctgtctttcatcattttctgctgtggtgtaagaggccaaacaggagaaagctctgtctccctcaatcgtccattctttcccatgggaagtgcctggtaaggatcagatggatcagtgtagatatagaaatggtctcattgccaagtaagccccaaacaaatatgtgcaggatctgagtgctaaaaataatgaaatgctggcataaacctaaatgaaagagacaattatatttatgaattggaagactcaacatagtaaagatgtcccttctccccaaaatgatggataggtttaatgcaattcctatcaaattttctccaaagtcttttgtaggcatagacaactttttccacaacttatatgaaggcagagacccttcaatggctaaaagaatcttggaaaagaagaataaaatgggaggaagaattctaccttactatttacctaggcttacttatctaagttacagtaatcaagacaatgtggtattggttgaaaacccagatgaaaacagagaacctagaaatacactcacacaaacatcctcaattgatttttgacaaaggtgcaaaaactttccaatgtaggaagaatggttttttcaacaaatggtactagagcaattgaacatccacaggcaaaaaatatgaatctcaacctaaacctcattattttgtagaaaacctcactcaaaatagatgatagactgaaaagtaaaatataaaacttctagagaaaaaaaaatagcagatgtcttcaggacctggagataggcaaagaggtcttagattaaacaacaaaagaatgattcataagagaaaaaataaaatgataaattttaccccatttaaattaaaaatcttatgccatgtgaaatattttcatccagtctgtagccagtctgttcattttcttcacataggcaatgtactactatgtaaaatatataaagaagtctcaaactcaagagtaaaatacaaacagttctattagaatatggacaaaagacatgggcagatagtccaccaaagagactctacagatgataaataccagaaaagatgttcaacgtcattaacttctggagaagtatgaattaaaaccacagtgagctatcactacacacctattcgaagacaaatatttaccaattgcataatatttaccaattgcactctgggcatttatccgagagaaatgaaaactatgtttacacaaaaacttgtttacgaatctatataaatagcacctttatttgtaatagctgaaaccagcactaaggcctttcaacaggtgaatggttaaacaaattgtggtacttgcttaccgtggaatgtaactcctgaataaaaacaaactatttatagattaacaatctggacaaatcactgagggattatgccaagtgaaaaaaggcagcctccaaagattacatactctgctgttccatttatataatattttgaaatgatagtgttttagaaatggaaagcagagagccagaggttagagagaaggcaatgtaggagtaaattgtgtgtggttataaacaacaaaagcaacttagggattcctgtggtattggaatttcagtatcttgaatgcaattgtgtacaacttgtatataacttaatacacacacacacacacacacacacacacgagttcaagtaaaactaggaaactgagtaaaattggtgttatgtcaatgccagtaacctggttgtgatagtatactacagttttgcaagatgtcagtattggaggaactcagaaatgtgtacaaggaatttctccatattatatcttacaaatgtatgtgaatctgcaattatgtctgtaaacatttgtttaaaaaatagttgaatgataaaatataacctacaacctgactgaattatatagaacactaagaaaaatcagaaagtttttgacctgatgacagttaagtaacattttgtaggttcaatatagttttgatgagtcctctgtcatatagccaatgaaatgagttcttgataggcaaggcagaaatgaatattgaataactctttaccattgtcatcaccattatcatcattattattaaacttatgttcccaggccaaaaggtagagttgtcgaatctataattaatgacttcagaaaagtataagcacttaagcattcttggattccttcattaaagaacttgaggctctttattaagttttagcccttcttactttgcctgtttagtaatgtttgtaaaaatatagtatatggcccaggcatggtggcttatgcctgtaatcccagcacttttggaggccaagacaggcagatcagttgagtccaggagtttgagaccaggctgggcaacacgggaaaaccccatctctgcaaaaaaatacaaaaaactagccaggcatggttgcacgcacctgtagtcccagctacttgggaggctgaggtgggaagatcacctgagtccagaaggtcgaggctgcggtgagctgtgattgtgccactgcgctccagcctgagtgagagtgagactgtctcaaaaaaatacatatatatataaaatatatatacagattatctattgataaattgtgtttataattttatgaaatgtggataaaaaactgccatatactgtttccttggatatattattagggggaaatctaattagagatcattaagtaaaattgagtaggtgcattttttttcctgacatttttattgatcttaggcatttggcagaatatctgcacttttgttctcagtaggtccagcgccaggcacctcccttatctaataaatggctaatataatttgtcttcagtaggatgactaacagctggatacccagtgcttaaaaatcaattgaaacaatacggctttaaagagctgagaattattaaaccaatgctatgaatcagtgctatttcacatctcttgctatggactgatttcccaatagaaatgtttttaatgacttgatgttttattgctgtgggtgaggaatatccttgagaagagatgtgtttggaatgagtaatttggtatcattccatgtgaagaaaatgttgaatagtcaagtaagattaatacacatccaactacatccttgtttgagatagttgtctgttgatagaaagggcatattgggtattgcagattgtgtagcaatagtcctggcccctacccactagatactacccatcacaccgagtgtgacaatagaaaaatgactacaaaccttgccagaggtcccaaaattgctcctagttgagacctctgaactaggacgagcttctctggttaatatgtttaatgtttttggggtttttttcccccaagttttgtatattcattacctaatatgcatactttccttgagtgactcagcattgtagataaccatgatctctcacctgaactagggcaaaacctacctgactgttttccggcatcctttctgactcctattttccgaattgtaatgttttccaaaaaccaatcttcttggtggctccttgctgtattcaggacagtggcccgagtctctaacgtgtcctgcagccccctctgcaggcttcctcaccccttcctccttggttttctctctcttctctgaactagccacggcctttcctgccatcggggttcgctcggggcaggctcacttcccccagttaggtaaagccaccaattatatattctcaacagccccatcataatgccttgtttatagctggaattttgcatgtaaatttatgattctgtgattcatgtctctgtttttccctggactgataagaattggtttgatttggaattttggtgctcaccgtttatttcctagcaactgttttttgcatgagtatataaattcagtcattcgaggtggccagaccaattaagtgacagcccaggtctacttgggagttgccaaccaaatttttggtgaatagcacacactgactggatgtcagcttttcatcaaaatggaccctacaattccacacagccaagaagtgttctgatttattccatttcatgctgattatacgtatacttggaattcatgcccactttcttcatgcaccacgatgtgcctcttgcttgctggtgttgtccagctgtgaccacaatctgctatcttcccaggagcagggctgagttccacctggctgctccgtctccctcagcacccgggaagctcggctaggtcagggcaactagaagttatgaggaaaccgaacagtgatccaggaaggtggatttttaaaaaatcaccacccagctatgcaaaaaggaacaccatctccttagagaagtcaagaatgggacatgctattttaaaaacagctttaaaaaaattattctcaaaagaaaatactacagatttgtccatgttttgtttactcttatgcttagttctgtatacgtgtgagtgccattattttgaaacctaagtgcattaaaatattgatgggaaacccttgagcattaaagttctgtgtatgtccgtgctaggtgtgggcaggaactgaggaggtggacaaagccctgctagccactggctgtgggaacgtggctccgggtcccgttatcacaccaagtaacacattcactgccgtcttccagtctcaggaggcaccagctcagggcttctccgcgtcctttgttagccgtaagtagccctaagaaccaaacccagaggtctttgcgggagtgtggttgtcacaggcaggcagggttggctaaacctgggggtctaggggaggagtatgggggtctacggggaggatgagtcacctaatcccaagaagacacctttcttccaaatagcagtgagaacagaactgaattgagaagtgatataaaagccatgaggggcactaaccaacgtctagaaataagcctggcatccagagtgggctgatattgggcagaagcgcagatggctagttcgttagcaacaaccagtgtggctggcctgtggcaccttgaccacaaaatcccgtggggggcttgaaacacatgcagattcctgagcctcactccaggcccaactgaattcagaatttccatgacgaagtctttcctgttttttttttttttttttgacacggcgtctcactctgtcgccaggctggagtgcagtggtgcaatctcggctcactgcaccctccacgtcctgggttcacgccattctcctgcaacctccacctcctgggttcaagctattctcctgccttagcctgccgagtagctgggactacaggtgtgtgccaccatgcccagctaatttttttttttttgtatttttagtagagacggggtttcaccatgttggccaggatgatcttgatctcttgacctcgtgaaccgcccgcctcggcctcccaaagtgctggcataagccaccgtgcccggccggtcttgcatgttttaactgtcatccagagggttctcatgctaagtcaactttgggagccagtttctttgggaatgttctttcctaattttgattaggaaggatggatctccttttctagctattgtacactattagattcgtgggaaatgtagcatttttcaagtcagagaagcaatggtgtgtgcctgttggctgagttaaatcaagtgtagccactcatggcaaaccactgtttagggaaaagtttgaggaaaggaattagaggaagtaatacagtagacaggtttttcagactgaatcagagagtgctggaaaggaagtactgaaagacaaccctagaccaaatcttaggtctgcaggtggttcactgtgtaagtgtgcacgtgtgtacttgtgtgtgttttaatgtcaatttaaaaggatagagatattttcgtgcttgatagatcagagagtgaagtggattaactagtcaatggttatatgaaaacaaatcattttagtggtgaaaagatatttctttctgtttcgaaaaccagggatgcatgtaagaatttgataagagttgggattaataaatccagctagttttaaaaagcaaccattgttgtggctagattacaatggtaatgaaaatagcagttttctaataataagacattttaaaaacattaattgtgtaaagtactaatcagatacaaatcattttttatctgttttatttctttatctgcatgaaccatattctatcattgctcgtttatcctttcttaatatcttaatattaagggatttgcagtagatttgtggtaatattacgaggactcagtccataaaactctgcagcattttctaaaaatgtataatattcttattaagcacatatgtatgtttttaaatcagagctttattctcttcattcttgcttcttccatttggaatatctcagggaactatgtctatagataatttaggaaaatgcctctttccttcatggacaaaatagatacacgagaaataaatgatctgatgatgactttttgttcccacataggatgtggaagtaatttcactggcccttcaggttacatcatttctccaaattacccaaaacaatatgacaacaacatgaattgcacctatgtcatagaggctaatcctctgtcagtggtcctcttgacttttgtgtccttccacttagaaggtaagtttattcttttaaaaaaattacgtttaattgacaaacaaaaattgtatatttatggtgtacaacatgttttgacatatgtacatgttgtagagtggctaaatccagttaattaacatgtctgctcactcacttacttagcactttttgtggggagagcatttaaaacctctcttagcaatttttaagtattcggcaagtaatcaagtatttcaggtattcaaccttgttattcgctattggcaccatgttgtacagtagatctcctgaacttattcctcctagctgaaattttgtatcctgtgaccaatatatcctaaatctccactcccacataccctaccagcctctggtaaccaccattctactctctgcttctatgagttcgacatttttagattccacatccaagtgagatcatgcaatgtttgcctttctgtgtgtagcttatttcacttagcataatgtcctccaggttcatccatgttgtcacaaatgacaagattttattcttttttaaggccaaagagtattccattgtgtatatctaccacattttctttatccattcattcactggtggacactcaggtccattccatgtcttggccattatgaatcatgctgcaatgaacacgacagtatagataatctcttggacacgctgatttgatttcctttggatctatgcccagaaatgaacttggtggatcatatggtagttctatttttaatgttttgggaaactgccatgcatttttccataatggctgcactaatttacattcccatcaaaagtgtacgaggaagagttcccttttctccacatccttgccaaaacttatctcttgtcttttgataatagccttggaagataagttcattcttaagtaaactctaattggttcttcagaaatgaatgaggagtaagtagaggcagaagtctaaaactcaccatttaaagaaaatattgaaaatatgttacagagtagatttaatgtaaacgtgattaaaatttcatccaatttttaaagaatacaagtattattctatgtattccatctagaagtaaaaaaatagtgacagaactttaacaacacaagtattgcataaattgcttaaagaaaataagtctgaaatgtttcatgttaacatagcttttaatttattcacttgcatttaaagtttatagacatacgtgtgcacacacacacccacattcatgcacacactattaaccaaaccagtgagagaaactgtcttattgagtcaacataggtgttcgacaaatattgaataagtaagtaaattaataaaattaatataggctgggcacggtggctcacgcctataatcccagcactttgggaggccaaggtgggcagatcacctgaggtcgggagttcgagaccagcctgaccaacatggagaaaccctgtccctgttaaaaatacaaaattagccaggtgtggtggcacatgcctgtaatcccagctactcgggaggctgaggcaggagaatcgcttgaacccaggaggcggaagttgcggtgagcctagatcatgccattgcactccagcctgggcgacaagagcgaaactctgtctcaaaaagaaaaaattaatatatgtgccctgcttttagtaaatactaccattgggcgttctttcttctgctccatctcggtcatcttcatcttctcagtcctgactcttcagtgcctgagttcctggccacaagtgccctctgtgttcattctcccactctagggaatgggccgttggcagagggaacagtagagatgccgatttgggctgggctttgactgacaatagacaccacttggtgtttaatggaggctttcacacagtggaaaggaaattccttcaaatagatgggtattttcaaccactcataaccatattaattttcttgttacatatcagctttctatttctaaaccacaatttatctgcagatttgtcaagctacctcggtatattcgaaatttcttactcttgggttagtctctcatggcagtgaaaagttacactttgcaaaatgttctatagcattcaacatctgggaaatgtatggtttataaaaatgacatgtcagaactcataaatggataaatttaacaaagcttgtctcacttaatcctttttcctatgacctcactgccttttcatacatctctgcagttgtaattttcagcacatgtgtttgcttaaaaaaatgccaagtgtaaatcaatgtatgtcactgtaaaaatggaatataaagtaaagtgtcatcttttcagcatttgctagcccaaaatcccagtaccataaaaagatgcccatgatatatgaaggcttgagggagggtaaaatagtttgtataagatgatccaattttctttctaaaataatgtgtgtgaataaaatctataaggctattaaccagtacattaagagttgtcaccactgtgtgatagatttattcgagatgcttattttcttctttatagcttttatgttatttttataattaggacaattattttaatagcaggggaacaacatgtggcttggattttgtgtttgtggtcattaagttaaataaacagtgcatctcacaagaccgtatcactcagactaagaaaggagactctagtaattgtactataaagccacagaaagcaatgctgataccagtggtatatgtattattataagagactctatcatgacctgagacagctccctgagctcagttatcaggtgagaaaaaggggagcagccctggaatatctcagtatagtacagggaaagtgagcacagcatttaggatggatcttaatgccaggtcagccacttactgctattcaagtgactttgtgcaaattacttcacctttatttctgatacttatatatatatagcactttgctatatatgtgtgtatgtgtgtgtctaatatatatttattatatatgtataatagtagttctgaaagtcagataatgttagattgatttctgcttccgctaatggatttgccaatcctcactcagttgaagactgattcttttctaagatggtatccttacaacaatgccttgtgacatttccagtgtttaagtgttcagcattttcaaactgctgcctgagtaatttctggctatagattcatctaattatgatgattccccaaaagggtgactttaatcaaatttattttataattagcttcttatccttaaccatatcaatgctgacatttattgaataccatcaccgagctacagattcgctagctacagtaaaagtaacctttccccagcccttctaaagtgagcctgagggattcatgtgcaatatattgggatgaaaccgaggattgctctgaaggaaggtcatagctttattgagggagccttggcctttctagctgctataggcacttggaactgtttctgagagactctgttcaaatggctaagcatttctgagcccaggatcccagcagagccagtgttgacttaggtggtgatgaaggttctagatctgtcatcttggtggaccattagcacaaaaggtgggattggcaaggaaaagatgtggtatcccaggctacaaaatactgtgaggaaacacacttgtccctatatggcgtctactaaacattgacacctgcttagggagggttttaccatgaagggaaaaatacagattgttgaaccacactcaactcttaggttacaaaggctcagtgacctactttccgcttaccacaaagtaagttgctccaagtttaatgttggtctaaatttctctaactttctcattacttttacatttccagtactagacattccatgaactacagaccattgatgtttgtcctcattttggaatctggtattattaaataactgcttattttattttcccaaatattaaacagtccaaaattttgtgttctcattattcatgtggccaactagaagccctcaatctgctaaaaaaaaaaaaaattatagatccagttttcttacttcatagataaagcacttcttgaggcaaaatgaagcaagccagtgccttctaaaccttgattattctttcattaaaattagatagtaggccgggcatggtggctcacgcctgtaattcccccactttgggaggccgaggtgggcggatcatgaggtcagggggtcgagaacatcctggctaacacggtgaaaccttgtctctactaaacaaaatgcaaaaaattagccgggcgtggtggcgggcccctgtagtcccagctactcgggaagctgaagcaggagaatggcgtgaacccgggaggcggagcttgcagtgagccaagattgcgctactgccctccagcctggacaacagagcaagactctgtctcaaaataaataaatacataaataaaatttaaaaaatgaaaaaaattgggtagtaacattaattcaccttggtgataatgaggaatttagaaattctcaatttaaaaattctacacgccgtaaactgtaaactcagtgtttctcagatccagtaattcttgacaagcattggagggtgcagcagcgcttagctcgtgaggtggaaacaccaaagggacaaatgcctttgcttgttgtcctctagagatggcttcaaagccccaacaggagtgggcccagattcacacctaatatttgcctaaattctcttggattaactgaagtcccagtttatgggttatatctaatagaaagcttaaagaaaaaaagtaaaaaaaaattagttttagatttttctttttgacatttttttccccatcaagaagcacaataaatgagctttgtcagttttctttatttcctcctatttaaattttttaaaaactggtattgctcaactgctgtttcttctctttgctttctcagttgtttctaaagaactcagaatgtggtcgcattccacattactttagaaaaaagtgggcagtggtccttttgaaatgtttcctattgatattttattcaactggcagagcactggagcagatggtgtagtttctgtgaaatcccttgtttgcctgtgttacactccaatttgctttaatttgtttggccttcgtgcgcaatggaacttagctgtatactagtacatgcttccccctcctctgaatcatgcctccgtagaggagaccagtctcccagctactcagggtaaagttaacaagacagatgataggtctcagtcactgctgcctggtaattcatgtgcctctgcctagaacccatttctttcttccttccttcctttctttttctttctttcttcctttcctttcctttccttccttccttctttttccttccttcctttcttttcttttcttttcttcacagagtcttgctctgttgcccaggctggactacagtggtgcgatctcagctcactgcaacctccgcttcccaggttcaagcaattctcatggctcagcctcccgagtagctgggattacaggcaccagacaccatgcccagctaataattgtatttttagtagaggtggggtttcaccttgttggccgggctggtctcaaactcctgacctcaagtgatctgcctgcctcggcctcccaaagtgttgggattacaggtgtgagccactgtgcctggcccctagaacccatttctatttcctgaaaatacttgatcttatctacaacatggaaatatcccaaacaaagggttttccctcatctctagtcctctttggtgtctcggcccacgccctccccccactttggagaaaaactgtggtccaactctaaatcccacaagtttattctatttgtggaattactcatccttagttttccttcagttctctcatagttcttagaactatgatgaagtttggaattagacattgcccagtaataaatcccggaaaaatagaacaaaaaattaaattttactgcatggtatagagccttgcccattgcaaacgatgaatatgttttaaagtttttaggaaggatggaaaatagtcataaaaacaaatgatagggaatcgttttgcagctcagagatttcagtagtaaatgtctatcaaatcacttgttgaagacagagttaagaattactgagttcccggtcccatgacgtggactctagtccacggagaaagtattgttcaatttcagggtgcttctcttcctcacaagttcgcatatgtctgatcgaatgctgcctcttggtcataaactcaactgtgatatccatcttgcttcttgaagaagtttttccaaacctcaactaagtttccttctctccctagaagacagtcaccccaattatgagagtgttgtgtatattttgattatacatacaattggctcttccaataatgatgagaaagtgtttaatataattattttctgatgcctttagtctgtcaccaacaccttctcactgaagaatcaggctgatatttttgatctaatgcagtgatgggatatatagaactttagaatatgatatatgtgtgtaaagtacttaatgtctagtgacacacatatccattttcttgcatattactttgttgatgttaattttttatattttcttagactttagctaattttaccagcttctaatattatgtacatgtttgatttcttttggagagaatttgaaagggcataacatcctaccttaaacaaacgactactagaaaggatacaagaatgttttaatccatgaaataagttgccagatattataatttctacattttactgaattaggctttgagaagcagactgtcttacataatttgtttagttagttgatattctattgccatctacaaaaaatctaaaatcccttgtcaacttcctctgcatttccccaacaaacttccttattgttcaatacagacatttaataaattgttgatgagttttgattatgtctcgtaccactgccatttcatgaatgaactttctgtatttcaactagttcctttaatcaactatttgtcaacataatcaagtataagtgacactataccttatgtttcacagccttttcactgttttctaagacaactgccactgtgatcatttatatcattagcccacaacttaacaactaactctttaatacctaacacatgcatagcagcctatttgatcaaatgtgggaccaagatttcaatccagcatcagcaatttttccctacattctgtgattttggttttataacttgatatattgttgctaaataatttctataactaatgcacaatttttttattctcaaactcatctactttgaattttttaaaattccagtggagcttttgatgtcttaaagacaaatactgaggttataactaaggtacataatttggcaatattcaaaccatgaatctgagtttaacttatttcttttttgtcctctttttccacatcatattgcttctaattacatgaaaaggccattgaagttcagtctttcactctttcaacttatagatttatgcccaattagaaatatttctattccagcattttcaaaataagggaattctttgaggttaatttaaaaatgtatatcttgaattgatacctcaagatttctgcaggctgaatagaaacttagcgaaggagctgaatgtattcttaaaatgatttaagaatgtgtggtaactctttaatgcacagagatgctttttaaaagtatttgtcaagattctttgaatggcaagttatcttcaaaagttagcttagatacaaagtagggtttataagaaggatactgggtgatttcatctcatcaaaggaagggcttctagaacaaaggaaaccagggacaagaatctgtcagcatgctctctcttccccgctctttttgctgattgctgcacaacttctttttcccttacggcagcctggcttccttaatgtgtcaggaaacatggctgcagacattttttaagtttagtatctttggctcctaccattgactcttactcagttgcagtttggacacatctgattggcctggattgggtctgatgccatgccttgccattgattgactggaattatcaatcagtcaatcaatcaaccatggtcaggatggtggggttgtataaacaatagcaacagtgactctaatcatgaaaatatctaccatatccattaggaggttttatggcacaattaacaggaaacttgattcaacctggtttaaacacaaaggagcaattcattggtttttaattctggaaggtttcaaagttgggtgtgcctcaaatctctcaattcagcattttaattatgtcatcaaatattcaactgtttctgtttttactttgtgctactccagtgtgagcctcatcctaaggctggctcctctcattgctgtaggggtgctgctctcacagtgggtactcctcacccacatcagaaagagagatggcttctatcctgtggtaagctagagttgggttgcaccatcttgcaagagtcaattttgctcatctattcctattctgcatttaatgacttgttgttaatagcttgaaattggctatcgtgggagtatttatacgatggaaattggcaaatgccacaaatctctcggagagttggttgttatatttaccagcatactactacctctattccaacttccaaatatcaaacaagggtgttgaaattcacctttattggactggattgggtcacacacccacctttgaaccaaggtctatggccaggggacttggaattataaagtaagtgtgcataacgattttgtcagcgtgctcttgtaggaagagtattctaacagcaaacagcaaacaggatgtctgatttcagagtccaccgtgccatagcatgtgcttatataaaataatgtagtttgggtcattcccaatggggcatttgtaagtaagtaaattttgtgtgttggggtgatgtggatcattagatatatgttcaagttagcatcgccatgaaataaaagcattttgttcttgtggcttgtaaatgaaaatgggaaaatatttcacattgttaatcatcagagcaattaaaattaaatatcacaatgaagtttcgtttcgcatgcaccagaatggctaaaattaaaaagactgacaatgtcaaatgttggcatccctgcagagcactggaagtcccacacatccctggtgagaatgtatactgatgtaactactatgagatatagtttggcagtttcttgtaaaattaaatacatacctaatttgggggctaataatttcactcccatttatatacccaaaggaactgaaagcatgtgcccacacaaaatctcatgcatgaatgttcatagcagcattatccataatagccaaaaggtggaaacaaaccaaatgtctgtcaactgatgaatagataaacaacatgtgctatcactataaaaaggaaaatattcagccataaagaggaatgacatactgacacatgctactacatggatggactcaaaaacattatattaagtgaaagaagccagccacaaaaggtcacatattgcatgattttattcatgtgaaatgtccggagtagacaaatccatagaggcggaaagtagtttagtaattatgtagggcaggagaccatatacaggaaggatgagactggagtgattgttaatgggcataacattttcctatgggcaatgaaaatgtagaattgggaagaatgtcagatgccaaaaatgttgtgggagagtaagtcggcaacaccaatctagggatcatttggtaacctgaaaaatagtcttaccttagtgccagtatctaacttctgaaaacttattctgatgaaatgatgaaaaacttcctcaaatatttatgtacaggaatgtttgtttcaacaatatttttatttacagaaatgtggagaatatagaatttcaagcaataggggattgatggaatgtggatggcacatctatatgttggaatttgatataggcattaatatattatgttggtgcaaaagttaggctggtttttttcctttcctttcataataatataatgttttattttatttgagatggagtcttgtgctatcacccaggctggagtgaagtggcgcgatctcagctcactgtaacttctgccttccaggttcaagcgattctcttgcctcagcctcctgagtagctgggactacaggcgcgcaccaccacacctgactaatttttgtatttttagtagagacagggttttgccgtgttgcccaggctggcctcgaattcctgaactcaggtgatccgcccgcctaggcctcccaaagtgctgggattataggcgtgagccaccatgtctggccctaatataatgttttagaagaatatttaatcacatacaaatgcatgatggatgtaatttcatattgatacaaattaggttaccatatgggtgtcatttcctattaatacaaattaggtatgatccaagttaatattttaacagtatgtgttcacctacaaaaatcactggatatgttgtagtggacacatatctttttaatttcttgtttattttgttttatatttttctttgggggatggtaggctggagcatatattcacattataattggcaaacaaaacaataatatatattttatagtccttaaacactaatagtgtttgtgtgaacatctaaaatggttgttcaataaacattaaggagtttctaatgatatctccatgataggagtcccttatctggacataagcttggagcaagttttctcagtagcagcgctattgacatgttgggctaggtagttttttgtgggtcccagagggtccggggtgtaggtgctgccctgtgtatagcagcatcttcaggagcaaccctggtctctactccactctacagtgtgacagcaaaaatgccttcagatagtgccaggtgttcttggggaggcaacacggtccccagtttacagtcactgagttaaaggaaccgttatctaaagaaaggaaattctgaattgtttcaaggtggaaagtgtctactgtgaagtcctacctgttttatcatacctgtgcttgttttgtagttagagtaaacattgtttcaacaggaaactaagttaaatatctcgtttctcattttaatttttatagcaattgcatgagtcatcatcacatttttgtttttatttttatggccttaattgtttgtgtaggttctgatcataatgcggttgttccatgccttttccagctcgttccgctgtgacgggaagctgtgtcaacgatggcgtgcacattatcagaggttacagcgtcatgtccaccccatttgctactgtgtgtggggatgagatgccagctcccctcaccatcgctgggccggttctgcttaacttctactccaacgagcaaatcacagacttcggattcaagttttcctataggataatctgtgagtagccataatgacagagtttggaattttcttcttttctgagtaatgtatacaaagagttttcactgcgattcatacagcactaacttgaagattcagagaatttaagggaaaaagattgtcagtgaggttcatggttaaaaaatacatatacacattttttcttaaaaagaagaggacctttttcaggaactttggctagaactactctgaaaatcaaatgaagaattgacatttgttttgtaatttaatttaaataaatactactgctatttttttgtttttcttaccttacacaaagttgcctgttggtccaaattatccagatgcctgttttgtttccccaagtcattttgctaatacaaaaattaatattttatatatttagaagaaatataagagaatgtctttacagtctgataggaaagacttttttaaaacactatgcccaaaacaaaagccctaatggaaaagattgatatattcaactatgctataatttacaacttctctgcatcaaaggcaaagagaaaagaggagcaatagactggacagaggcatttgttgctacccagaaaattctaagattgcatttcctgatcttgaatagtcttttcccctcctgcctggttagtttgctgacaatatttatgcactatctaatagacatctcagctgcagtcaaactggcacacaaatcttgtaacatctttcttgagtctatttcatctttgctccaccaaacccattgctaaaggtagaaagttaaatagtttcccttggaataaattattgttcccatctccagagaagactaaaaacatgtatttacttctgaaaaggccctccataatttgttcacattagctgctatcggcatcctgactcccacagtttgtaaagtatgactacatatggctgtgtagctctgttggctctagcagaatagaaccacgcaattaacgtttcctctcccgtcgtcttgttgaataaagagaaggatggatttgttttattcttttggcacaactgctgctttggagaggtaaactcctgctttatattcttcttctctttaatctctcattttcctacaaggaagtagtcaagattcaatatattctagtataagagtcccacttaaagagtgtcgttgatgtgaagacttcaaatgctgatattgtgcaaagatgggagttatttaggccttgataaacttccagagaccacataattgtgtataaagtgaaaaggagtgattgctacccttatctgacatgtaattcacttttacagatggacctgggggtctgaacacacaagtacttacaggcacatagagaagagtgctccctgcaaggtgggctcagttgaggcaaaaacagtaaagaaataaagagcctgacatggcagcctcaatttgttcctcatttctgaggatgtaaagtggaacgtgtccactgatagtgtataaaccatggaaatacttcaaaatgcgttaaccccattataattttagaatcataaatatacatagataggtctttccactgcagggagagtgatcatcaggaggtacaatctgatcctcatatgtaaacccaagcaaaaataatcactttatattgtggataagaaggctttattacatttttatgtctgtcgttttattgactaatggatctagctcaaggctctgagctgttaattgctggaatcctggagaggaacgggcctggcctcctcctgcttgttgaggattgaggatcagtgatattaatacaaactggggcaagtttagtccttaccagtctcacaactgactgcaaatccaccagactggagagctatacatttgagcccacagaaggaactaaactggaaagctccaaaaatgatttccagtagtttaccatataatattctatccctgacaggagagacagggatctctattatttcagatttccagatcacaaccttcctagatctgtacgcccagaacatcattctggccgccttttccgtacttcgttactgttgtcatccctctctcaacctgtcaatgaaatacagctaagtgatggtgaaatgttcctgctcgtcattttcactctggccattaatttgactcagactgattcctttccaagatgagcctttaaatattcttccctgtttctaccctcttgctgtctttcatcttccttcctagtggaaaaatcagaattatgtgtaaacacaatgaagggagatataagtcactttaagaaaaataattattacctcttttagggaaaaatgtacaatagtatagaatctcttaaaatcatttttccatgctgggactaatcgttgttctcttcatattcccttgtcttctgttgcagcctgtggtggtgtgttcaatttctcttctggaatcatcacaagtcctgcctattcatacgcagactacccaaatgatatgcactgtctgtataccatcaccgttagtgacgacaaggtgatcgagctcaagtacgtaagacaaattggctttcttaagaaaatcctttcagcattatttatagaagagccattcgtttattgatggagggcactgattctcatcggcagtctggagggaaatctacacagaggagtgatgttcctagatgacagttcaacctgggaaatgacgctccccctctccacacaagccggtagtaactaagggcaaaaaacaagcactcaccagttaaaacagtcgttatagtttcccaacaattgtgaaggagcatcataacatggattgtcaaggtataataagcccatcttgaaatcaaaggagagaggaagggcaagagaaagcagttgccatgtgttgggtatttattatacacaaagaactttgattcacacgtgccgtaattgtctcattgtattcttaaaacagtcatatgaggtatatatagattctagattgggaattgtatagattattcccatttcactgatgaggaaactgaggctcagaaggatcaaattgctttccaaaagtaacacacacataaagagtcaaaatgtgtattcatgccaggcttcctccaaacaccacatcctcaatgtttcccaatactgtctctcaaagtatacattttcttttttcttttcttttttttttttttttgagagaaggtctcactttgtcacccaggctggagtgtagtggcacaatctcggctcactgcaacctctgcctcccaggttcaagagattctcctacctcagcctcctgagtagctgggattacaggcaggcgccaccatgccctgctcagttttgtatttctggtagcgacggggtttcaccatgttggtcatgctggtctcgaactcctgacctcaagtgatcctcccgcctcggcctcccatggtgctgggattacaggcatgagccaccgcacccagcctcaaaggatacattttctaactacttaagaaatctatttttatacctgtgtcagaacacctctaaactgatgctatgagagatagcttgagtcactggtcaattttcttcccagtcttacctattcccaacaagactgatgagggcaatgcaacctcccactctccagaatgataaagttcaagactgttttcacctgacagcctatttcagtgatatacgtatggcatgtggtgggaaactctgacagtaatattgttcatggtcatgtaggactttccatacagaagcctgatgggctaagaccacacctacctacctacctacctacctacctcccctctatttgtctgtgatcattttctaccctaaagattctgtactccctgcagtttacttccagaggcctcatgtatcagttggctctccaagtgaacaagagatgtcttgatgaaagacatctctcatcaagcctgatttggttcctgtatcaggcgttctataggctggacctcgaagaaaactgcagctcttacctggactatttgtaggaaaacagagtgtcttttaggtcttggggacaaaagaacagaaactgtcagatggccaggagcaggagttctgtgaagtatgcctgcacaggcgtgaaagtgtaagggggagccatttgctactgtgactcactatttgtttctcatatgtgtaggattgattattgccttgttctgttcaggttgctttaacaaaatatcataaactgggtggcttataaacaacaaaaggctgcaaaagtccaaggtcgaggcagattcgttgtctggtgagctcctgttttctggcttatagaaggtaccttcttgctgtgtcttcatgagctggaagggcctcttataaaacactaatcccatttgtgaggggtcctcccccatgacctaatcacctcccataggccccacttcctataccattagcttagggaacatatgaatttaggggaacacaaacattccaaccatggtatacataccaactcatagaggtatgttatatattctctctctctttatctgtctatctatctatatatatatgtatgtatacaatctaaatgtattttttcagttttcagcctggatcctggagctcaccataatgaaatttacatctgcatgtttattttattttacttatttatttatttgagactagctctcactctgtcgcccaggctggagtgcagtggcgtgatctcagctcactgcaacctccacctgctgggttcaagcgattctcccaccttagcctcctgagtagctgggactacaggtgtgtgccaccagcctgggtaattttttcttttgtatatatatatatatttagtagagatggagttttgccatgttggccaggctggtcttgaatccctgacctcaagtggtccacctgcctcggcctcccaaagtgctgggattgcaggtgtgagccaccacacccagcctacatctgcaggtttagaaaattatttattgcgcactaagagcctacattctaggaaacagataagattctaggtgtggtagaagatgcagacattaataaaaggctctcaaaagattgtggttacacaagcttttctgtcaatgggcttttcagatctcttctgtgctctcctgggaaaatgatgtaaaataaaaagccaaagcagatttaagtcctcttagaaactcagattttatctctctttgtggattctttttgtgaaaaataaatgtgttgtctgtagagaattaaaatgaatacagtgttgttggaaattatctagctattgttcttccctgatcttttacaataacattaaatgttaaatgtggtaaaagaaaatcaatacggttttcatcttgttcctcatcagtctgaaaaccttcaaccaaccaaaaccttttagaaaaaaaaccaacaattttttttctcaaggctgttgaaaggaagcatttattatatattttatatataaatatatattatttagtctatattttcaaaattattccatattatggattgtttattagagctactgccaaaataaattgaaaatgcaggctgggcatggtgtcccatgcctgtaatcccagcacagggaggctgaggcaggcaggtcacctgaggtcagaagttcaagaccagcctggccaacatggcagaaacctcatctctactaaaaaatatacatgtaattaaaaaaaatagccaggcatggtggtggacacctgtaatcccagctactcgggagggtgaggcaagagaatcacttgaaccagggaggcagaggttgcagtgagctgagattgtgccactgcactccagcctgtgcaacagagtgagactctgtctcaaaaaaaaaaagaaaaagcagaagaacctataaaaatgaggacaggatatcaaatattatttttttaaacaagttttaaaaataagctataataaacccaccacaaaactctaaagtaaatccatgtaagaagccttgcttgttcaggaactctagaaatcgttatttgaaatgacaaagaataagacctgaattaaacactgtataagacagagaaaagttagggatgcatctgtcaggataggttatgcacatagtaacaaacaactccacctcacagcagcttaactcaacaagttgatttctcattgtaatgagcatgttcagtgtggcctggcatggaagctctgctcatcgtggtcatccaacaacccaggctgatggaagcttcgtttttacatttgcttccatgatcatcactgcagtgggaaggcagtgtggcaaagcaagtagtcatttgtaaagcttcttccgtaaagtaatatgtatcccttctgcttacatttctgtggtcaaagcaactcctagcagccatgtcaagcctcaaagtgtgcccctagggcaatcctaccagtgctggggaggcagagagctgggaccatgtgcagaagtgtcagtgaccaccacagaggtcttaaatgtaaatttcctgttcttcacctgaccttaacataaacttcattttaaaagaggaaaatgagactgtgaggagaatggagctgtgattctaaaagcagcatttcttctattatattaacatgcttcccataagttctacttcatctcataaaataacaagggaagagtaaatatggtatttttaatgagacctaaaaaactaaagtattgctgggatagtaaatatcagttcaacttgtcaaaagttgttctcagatggactttaatatgccctagactgtgaattccttgaaaagtaagactgtatcttactcactttgacatccccagctgctgtcacagtttttgttgtattgtaattactaaaaacaaatttggctaaacttttgaactgatcagtaaagtactgtttgatttctaatatttcatatcaagtgagttttgaatgctctactggtagttttttccttgtcattttttttgcaagagctaaagctacaatttaatagaagtccaaatggaaacatcagtattaacaaggtacatttcacaggttcagtgattttgatgtggttccctccacctcctgctcccatgactacctggcaatttacgatggtgccaataccagcgatccccttcttggcaaattctgcggttccaagcgcccaccaaatgtgaagagcagcaataatagtatgctcctggtgttcaagacagattcatttcagacagcaaaaggctggaagatgtctttccggcagacattgggtaagaattctggacttgtaaatctatttgtcaggactgttacctttctgctttatttaatttccccgccccccccccacccccacctgattatgattgcttttccttgaagcttagaagaatatgccatgtaagggcttggttttaaaacttacgtatgacatattttaatgttgtaaaaaaatcactcaacaaatgtacccagcactttgggaggttgaggcgggtggatcacctgaggtcaggagttcaagaccagcctggccaacatggtgaaaccccatctctacaaaaatacaaaaattagctgggcatggtggtgtgtgcctgtaatcccagctacgcaggaggctgaggtgggagaattgcttgaacccaggagatggaggttgcagtgggccaaaatcataccattgcactctagcctgggtgacagaatgagactctgtctcaaaaaaaaaaaaaaaaaaatcactttggtagcacagtggaggaaggctagaagaacctacaacatgggaaggaagaagcttatgatagaaatctagatgggaagtgtcaaagccttgaacggacccagaggggaaagagataaagggaagggcagaaatctgagagacggaaggcagaatacattggaagcacagtgtttggactctgatgatattttaatgaggacatgaattgaggatgactttctataggtaatttgttggatgatggtggcttaggagactaagatttaagggagaaatgttttatttaatttggagtattttaagttggaagacctgtttaaatggagctgtctagttggaagctgatgcttgagaaggaatttggactggagagggtgatgtagcgggggtaggtaaagttaggtgagaggataaactgaaaatatgccccagattactcccactgcatgtgagaaataaattatccacatcaaacaccactggtgagaaatacccatatcaaattaactcagaattttgaataatttaaaataaaaggtagttaatcaattacctgtttggctattctaacagcatcagtgacacagtctaagatcattaatattcgactctggaaagtgttttgatccttttccttttgaatatagatgtgattaatgttctaaaaatgcacaactctccaaacaaatctcatactctgtgaagactcagaaaaatccaggcagttttctgtaataataaccctgattcacttttcaaactttctgtttcttccatagtgtggataaacttcgtttctctgatgcaaaacggagtttaccttcaacttcttgatattgggcatgtgaatttttccatgcagtacttgaggaaagcaattagacattgtgttttgaaggcttcccggtaaaccacacacctcaagacaaattgtatcagaaaatccctttgccacctcccctacttagctgtctcaacagtaacttgaaagcaagtctcacgggcagtgagagagtgttgccttaacagaattgtgtaggtgaagtagcatacaaaagccagaaggctattttgaaagaaaaattaattttcctttggagatttttttttgcacaaaaaagggatatattcttgcctttagcacagactttagaccaaatgtcctatgtctgcatttgctttgctacctttcaagttgtttttctttttcctaatatagtctcacaagaaaatggtaattgttgtgttaacaatctcctcactgctatcatctgcatgaagcttctcaagtgagccagggttccctagcctcattaaattaccatgtctttccaagccacaaagaagacatttttagacctattgtgatttaacagaaggaaaagtcttacactgtcagaagcattctctatgcacgagtcattgaacaattacagtcacttactgttttcctctggccacagttagggaaaaggtttaagtggagaatgtagaaacggaactccttgccagcattgtgttacccctgtatttcatgaagatgatttttacctctttttcatctgcataaatgccatcagccacttggaaatacttcaagtcattgtaactactctttgatggtaatgtttaagtgaaaacctaagtattatgattttgcattgcagtggtcttacaaagctttcaagaccacacactgacaagtttattgatcattctgcataactttcaaattttgtttcattttggtttttattgtttgtagtgaggagagggggaaggaacaataagaatagctttgactgtaaggtttatagggtcgtttagttatagctttggatgaagacaaacttggctaataggatgccccttttgcctccaactcatttatgtaaaacaactctgtctttcccctgaagagagggaaatcaactttgtggaccagatagtggattttcatttacaaagctgtttgctcagcctggaaaacaatatcttcacttagtaaataattgatgtgaagaggagaccattttagtctatgacatttccgtttcgatcttaactaaaacactaagtagggttttgcagatttgctatttagattatacacttggcaatgttttatgtacatctgcttcaatttttcaggatgaagagattggcttatataattatgtgactattaggttcaattcgccttgtgcatttgttatatttgtattgctagcgagtcacagcaaatttgggggaactatccctagttgctaattactaaatatgtagtgaaattgggtctcctttttcctcggaacttctgctgctggaggcccatatgcatggatgcaaggtaaggagaaagcacatttggcaagcatgagctgatctctaactgcaatggaaatgtgcctgcttgtctcccccctgtgctccaatgctatatgaataattgatcctgaatggctgacaaccagcaaaatgatcacactgggctgcagcaatctgtgaaactctgaaataatctgcaaatcggagcatttttcctaaccgagttcatagtttgcatcagattgtcaatggcttctatgctcctataaagtttaaaaagctgttggttctgtggatttggctaagtgggcatggcctataggcagaacggatgcttttaagtaccttctgtcctgttaacttctgctagtttagttgctgccccttcctttaccagcagggtcgtctcctgccttgactctgtttatgtgtgtcctgtacaaatcacttcacacttgcaaacgtatttttaaccatcagagcctccagttcttcctgagggggtctcataccagagagttgcttggcctattcacaatatgcatgtcacactacacatcaaacttctacacatagggttagatcaggggctttcagtaaacttatttatttactgtgcagtagcatcattgtttcattttttttttctaaaatgatgtattctataacacttcagcaaaacttcagtgtagaaaatggaacttggctctattagatgggaggtctgcaggcatttcaattagtgagttgccaaggagagactgaggggtgtcccctgcaagacagcagggggacagacagcacaggaagacagatggggaagacgcaccctcagggacaagtggtggcagtgcctgtgtttctggagttggttccttctggtgggtttgtggtctcactgacttcaagaatgaagccatggaccttcgtggtgagtgttacagctcttaaaattggcatggacccaaagagtgagcggtagcagggtttattgtaaagagcaaaaaaacaaaacttccgcagcgtggaagggtacccgagcaggttgcggctgctggctggggtggccagcttttattcccttattgccccctcccatgttccatttttgtcctatcagagtgcccttttttcaatcctccctgtgattgggtacttttaggatcctgctgattggtgcattttacagagcgttgattggtgcattttacaatcctcttgctagctacagagcgctgattggtgcattttacaatcctcttgtaagacagaaaagttctccaagtccccacttgacccaggaagtccaactggcttcacctctcacctggactcaaagctcccagccagcccctgttgcccagagcacacatgctgatgacgagggccactgtctgccttcctccacctggggtatttgtcacatggagactgagtcaggttgcattaaggtcagttcagagacctttgctaagagaccaaggcaaaaatacccaagcacatatataacaaggacagaatgaattacagtccaacaaatgtataaatatgttcaggtaggctgggcacggtggctcacgcctgtaatactggcactttaggaggctgaggcaggcagatcacttgaggtcaggagtccaagaccagcctggcctacatggtgaaaccccgtctctactaaaaatacaaaaaattagccaggcatggtggtgcatgcttacaaacccagctacttgggaggctgaggcaggagaatcacttgaacccaggaggcagaggttgcagtgacccagtgacccaagatagcaccattgcactccagcctgggcaacaagagcaaaactccgtcccaaaaaaaaaaaaaaaaaaaaaaaaaaaaagctgggcatggtggctcacgcctgtaatctcagcactttgggaggccgaggtgtgtgaatcacctgaggtcgggagttcgaggccagcttgaccaacatggagaaaccctgtctctactaaaaatacaaaattagtcaggcatggtggcacatgcctgtaatcccagctactcgggaggctgaggcaggagaatcgcttgaacctgggaggtgaaggttgtggtgagccaagattgtgcccagcctgaggaacaagagcaaaaaaatccatctaaaaaaaaaaaaaaaaaagaaagaaaaaaagacatatggccagatggaaagagctgattgatgcatgatatcattgcttggtgatacggctttagaaaagccctataacgttttgaatctcaatttttatctactaaaaaactgatcaatttgaaatattacaactatttaagaatgtgatggggataaagcagataatttctggaaagcaccttagctgtcagagtgaaagactctatgtattagaaagtaatattgaagtcccaaattttcaagccccccgcccaaccctatttccaaggttggagggtggctgagggtggggtgggcagggatcaacattctcaacaggaccacatcatgctacagtgatttttcgttctttcctacccactttgcagtgacacctaaccgtcaaatcctaaagtacattttataacctaaatctgaaatcaaaagctacattctgattaaatccccaggccttgcacaattgttactccatcgatattgtccatatgagtgatttacagaataaatggataaattgtgcctacttcaaaatcatattttataatgagatataataatataccatatagaacacattagattttatctagattcagctcattctcaaaattcaatcctggtttatataattgttgggtaagctctacacagggaggtaaattgaatcactttcatcttcagagaattaggaataccggatcacactcaatatttaggtcatctgtgtttctctcctgtgagtttttgcctgttaccttaacatctggaaaatgtctctcaaacacgttaaatgaagacagtgggagtggcagaaggaagttgaaggggataaaaaagaaggaaacaggaaagaaagaaagaaggagacagagaaagctgaagagagtctagggccacaaagatggaaaacatggtcacaacaaatggaaaaaaaaatctaacatgtccaattcagacttctgcttctagttatttttaagtttcccagttttggtgttaaatttaaactttgtgaggcattctaaaatagctaaacaatacaagaataaacttaaaaattcaatggcataaaaaatatatgtatatgtctctaggtacctcttggtggcctgattgaagttgtcagctcacgttactgttagaagtacaaatgtaataaggaagttgaattataacttgaataattggataaatcactgatcaaacaactctcagtttagcaataatgagggtattgctccaaagcaaccatggaatgtcatttttctggtttcctaatgtcatttgctccctgtgatgaagtctgagaatgagatgagctgaaactgtaaacccatttaaagaaaaacccaactaagcttatttccgctctttttaagccctgtaccttttactggtgattagacttcccttgggggatgatcctaaagacaaggttatcttcacgttattctttgtgggttttatggggaaaggttttttgctgagctgagaatgtgggaacgggataaagaaaccaacaaatgcttagttcaccaaaactttacaaaagcaagtagacaggagttaaataccaaatcagcaagaagaaaggaaaggttcttaataaacatatttcaacactggagtctgtgcccccaccaatgactagattgccactcctggtcttgaaggatggggctgtccttgtgaaaataaaaccacatggtattgtggagaccaaactaagtgataaaattgagttaatggtaaattataggataacattttgaaaaacactgaagggaacaggtgctgggaagaagcacttattatgtgtaatctaaaacacaagacgcgacctagttttgtcgcaggtaactggttattttgggttaaattatttgtacccataaattccctataataatcaacatccttactcagatcagcctggctttgttatagcattcccaggaacataaaaacaaaatatatgcagtgagcaataaaaattttaaaacattcttttgttataaataaactgttaggaaatataatagtgggaccgtgttcttctcttcattctaatatgtgaaaagtctgttaacattacatggtagctgtacattttgctcactcacaagtaaagacttgtcaggaaatcccagggcatcgtgaaaatcactgcttgtccctgaacctgtgccctaccagatgtagcatgagctgcttgatgtatattactttatctaatcctcagagctaccagatgagacaggaattaccccattttacaaaggaagaaagaaaaatttaagagattaagtaatttgtctgtggtccaaagggtttgtaagaggtaaagccaggctttgaacatgagtttgactgtcccccaaactcctgattttcttagtaagccttcattgcctctgtggcaattgataaaaatacccagggatgtgatgtgtgtgtgtgtgtgtgtgtgtgtgtgtgtgtgagagagagagagagagacggagtctcactctgttgccaggctggagtgcaatggcgtgatctccgctcactgcaacctccttctcccaggttcaagcaattctcctgcctcagccccttgagtagctgggattacccgcgcatgcaaccacgcctggctaagttttgtatttttagtggagacgggctttcaccatgttggtcaggctggtctcgaactcctgacctcatgatccaccctcctcaggctcccaaagtgctgggattacaggtgtgagccactgcgcccagcccccagggattctttttaacagaaatgtatgcaaaagggcactggaagcaagaaagaagggatctatggtacttggatgttccgtggaagaaaggacacaggactgttagaggatgcacctcagagaatgtgagtcctgaattatggtgcagtgggtaagagggtaaacgtggagcatcacatcccagattcaaactcagtttgtacatctcattgaggtcgatcttggacaatttacttatccactctgagtcttgatttttttttttatctgtaaaaacagtacactaataataatgaccttatagggttcagtgattaaattagaaaatacttgtcactcatttcacatgcgagaatttttagctataaatagtattattttggaaggataagaaggcattcattggccaggcatgctggctcacgcctgtaatcccagcgcttgggaggctgaggcgggctgatcacctgaggtcaggagtttgagaccagcctggccaacatggtgaaaccccatctctaccaaagaatacaaaaattagctaggcttggtggcacacacctgtagtcccagctactcgggcagctgaagcaggagaatcccttgaacctgggaggcagaggttgcagtgagtggagatcacagcactgcactccagcctgggtgacagagtgaaactctatctcaaaaaaaaaaaaaaggcattcattgggaaaatggacaatctatggagaaataaaacacatgcacaaagttacaggtgcatcccatttcaatggatgccagctaacctgaacattggtaatgctttggggcataaggcagagaacaataggtgctgagagaggagagatatgcaaaggccaggcatggagggctctgtatcatgtgcaaagaggagccagtcattgttttgagctggagcgtgctatcatctggtcagatttattttagaaagcacatcccagcacctgtggggatgatgttttgaagcagcattccagggaaaaagttagaaaagtattgcaatagtttaggcatgggatgataagagcagtggtaccatgaaaataaagaaagagactgaaaggagaaatcctcaagatatagaatcaataacacagtgttccatttgagagaagcagcttgggaagaagaaataataatgctcctaaggtttctggacaatgtcttgtgacaccactattcaaatagaaaattactaggagaggacagtgctttgcagaataaaataataaaaatgttgggttttgtctggagaatttgatgcctttaggatatccagctagtgatcagtaggtagtcagataagagagttagaagctcagtagaaacatcttggctggagttttgctcttttttattttgaagccatataatgtggcacatgtacatttataattattatatctttctagtggattgactgataccattatgtaacaacgtttttaaatgctttttgccttaatttctacttgttctgatttagtataacttccatagctttcttttgattcatatttgcgtgatatgtttttaaacccttttattttcaacttgtctctatcctgaagaatatatttggcttttgtttggctatgcctttctattgaagaatttaatgtgtttatatctgataaaattactaacaatattagttttagatagacctttgtactatttgtgttttgtttgtcccacttctttttgttttcctttaactatcttttctttttaaaattaatcacttttttattactccccttttaaaattattatttatacatcctgtgactcttgtttcagtagttaccttagagattacagtattcaaccttaatatgttagaatctaatttaaagttgatacttttatcatgttataatcaataatcaatccaaggaccttggaacattttaaacccacttacccacttcctgtcttttgtgctatctatgccaagtattttaattctacgtacataataggtacacaaaacatttttattgttttatacaattactaataatgtaaaattacccttgctgttatttttcttttcttcctgaaattctatgcttccatatgggattaatgtatttcttttggaagacctctcttttatgtttctttcattggagatcttctggtaaaaagtgttctttgtttttgtttttcgaaaatgacttgattttcttaaattctgtgggattcttgctctgagtatagagttctaatttggcatttattttcattcaggactttacgatgctattccatcatgctctggcttgtattattttgattaggaagccattgctttctataactggggacccccatccctcccctggtcatctcattgtagagtactgttattgttgctgttgttgttatttaattttattttagccattctggtaggtgtgtattaatatctcatgtgattttaatttaatggtgaacaattttcacgtgcttttcgtcatctatatatctattctctggtgaaatatctatttatatcttttacccattttctaattgaattgtttatttttctattgttgggttttgagagctttttatctattctcaatcaatgatcctttgtcagtatgtggtttgcaaatgttatttcccagtctatatcttgccttttaattttcttgccttatattggcctttcactgaacaaaagtttttaatgttgaagttcaatttatcgactttttcttttatagatcatgtttttgataccaagtctaagaattctttgcctaccccaaggtcccagagattattctggtgttttcttttaaaagttttatgattttacatttttcatttgtgtctatgatccattttgagctcattttggtttagatatgagatttaggtggaagtcagttttttgcctctggatgtccaattgctctagcaccattggttgaaaaggctgtccttccttcattgaattgcattggcacatttgaaaaaaatcagttggacatatttgtataggtctatttctgggttctgtattctattccattgattatgtgtctaactcctcaccaatatcacactgtcttgattactatagctacatggtaagccttaatatcaggtggagtgattcatcccacttcatttttctttgtgaagttgttttagctatttgaaggcctgtgcctttccatataaattttaaaataaaggctgggggcagtgtctcatgcctgtaatcccggagctttgggagaccaaggtgggaggatcccttgaggccaggagttcaagaccagcctggccaataatagcaagaccctgtcttcaccaaaaataacaaaattagccaggcatggtggcatttgcctgtggtcctagctaactgggaggctgaggtaggaggatcccttgagcccaggagttcaaagttgcagtgagctgtgatcacaccactgcactccagtctgggtgacagagcaagcctctatcctaaaaaaacgtaaataaataaaaataaaaataagttaagctttttgatgtttgcagaaaaaccttgctgagatttttataggaattgcattaaatctatccatcaatttggggaaaactgatgtctttactatgttgagttttccaatccatgaacatatatgtatctagacttatttaggccttcttttatttatttcattattttgtaattttcatcacataagcctgtatctgcttcattaagtatatacctaaatatttcatttttttgtaatgattataaatggtattgttttttaattttggtctccacatgttaatggttagtatattaaaatttgattgatttttgtgtattgttcctttatcctgagttcttgctgaactcatatgttagttctaagaatgtttttccatattacttgggattttctgcagctaatagttacttgcaaaagtggaaattttatttcttcctttccagtctctctatatattttttcttgctttattctggcaagaattctaatactacgctgagttagaggggtgtgaaatcaatatcgttgccttgttcctgatcttagggagaaagcgtttagtatttcaccattaattatgctgttagctgtaggtttttgcagatggtttttatcaagtcaagaaatttctcctctattcctagtttgccaagagtttttatcatgaatgtgtgttggattttgtcaaatcctttttcagcatcaactgacatgatcatgtcattttgcttagtaaattatttttttaatttccaagttggaaagaatgattctcataaaatgccctggggctaatgatgtatgcatagagcattttcagtgatatctaaataatgcaagataaattaaaagataacgataaaattttccttctcctaagttctttatacaagtattgctctttttctattaactacagctactgattagcttgctgaaattacctttcttttagtaaattaccattcttttagttttatgattcctaaatattaccagactaaatacacattttaatttagattaagctgggtttcaaattaggataactaaagtgagtcaaattaagtgaagcaactaaaaacaaacaaaacaataaaaaacctcattacaaaaactactaacttttttcttgtaaaacataaatattatacctgaagtattgtacacattggagattagggagtaaaataataaacactgtttacttttagagaaaaagacaaaacaggttcgtctgaaacctagtagaatgtttttacatgaatacactgctttggagcaattgtgtatctgcagctttataaattacagtaaggctgattccaaaaaaggataatgcatttctagccctgcatccctgggtggtagaaaggaagctgtctaggtgtgctcgaatttccctaaggcaccagctttaaatgtctttgtattctgcttcctgtagtttccagtaaagcttccttcagctgcagcctaaagccacagatggcttgctggaaacaggagagggcctgaagtcaagccagtctgtatctgctcgtacagcacactgtgcaccttctcagtagtggtcaaccagagacaggcagagatactatccagacaacctcaggaaaatgtcagccgtatagaatgtgagccacaaaaatgtcaattctccaaataatgatttaaaaatgtatctaactccactgaagccttcgagatgttttatccaagagaatgtaactattttttcccttatcagattgatcttggcttaagcttcactctgaggtttagtcattggaaggtaataattcaggattcggttaccgatttttaattaagtagatttagacctggatctcactccttattatggggttatatttccaatatttctttagccaaaacatgtattttctctgaagaaatggctcttttgtgtgagagagatatttccaattcagggaagaaagagtgacgtttgttcttggacgcagggtgtgtcatcagagagtgactgacacacctgattgatgaggcaggtgctgatggatgagagctgtctaggtggccccaaaatgtgtagtaatgaggaaatgatggattggtgatgctaaacatatcaaggttaagatggcttatacattaaaaaatgcaatttcaaaatatcagtatggtaaatatatatgactttctgatgcgtgggactctattgcatagtcacagaggtcgcccttgtttatattcccccaccattgaaacacagaaagagcaatgtggcaatagctccttttgggaaagaacccttcttttgttaatattgatcattacgttttctcaaagacatatacacttacatttcattttgcatggagcagttttgctatatttaagcactaaagagggggaattagagcaattgctattccctgcactacacaaataactgttcactcatgtaatatgatattcacttcaaatatttgattattttggccaggattatctcatgatatttttctccatgttctttattctgtgtgtatattttgtgaattgaacaatgagctctattatagtttgatagctcaaacaagctattaatattagttgtgtgtattagtctgctattaccatgacagtgctacttaacaaaccatccaaaattcagtgtcttataatgaaagcatttgtttttatcacttatgggtccacggactagcttgcctgcctccgttccaagctgcgggttggctgtagttggctgtaaagttgagtctgggttcaagtctgctccacatgaatccactttttctttgaaccagcagttactcagcacatgatatcttagtggatcacaggagcacaaagtcctagacaacaataaaaacaagaacaaaacgtaagcacgtttaaggcctctggctgcttcatgaccactaacactcattctaaagcaagtcgtagggctaagcctaacatcaagtgcacagaaaaatatactctccattttagtgcagtgcaaagagagatactgaagaattaaaaatcagccagttaagctgggcatggtggcatgcacctgtaatcccagctattcaagaggctgaggtggaaggatttgcttgaccccaagaatacgagaccagcctgggcatcatagcaagtcctcatctagaagaaaggaaggaaggaaggaaggaagggaaggagggagggaggggaggggaggggaggagagaggaggggaggggaggggaagagagatagagagaaagagagagagagaaagagagagagagaaaaaaggaaaggaaaggaagaaaaaagaaggagtgagggaggaagagaggaagggagggagggagggaggaaggaaggaaggaaggaaggaaaggagggaggatggatcagccaatttaccactcaatccatggcaaacacatcagtgatttaaggatgcttgttctggggttccctggaatgtgggtgtgctgctttatggcattagtcatagcagtagtactacataataagtgtgtgtaatggcattcactgggcccaagtacaattgccatcttgcccttatgaacttattagtaacagttaataaacaagtagtgataaatatagcttgaatgtttaaaaataacatttagtttttgaagctgatgattaatagaataatgcccagcaacagcattttcctgtctacctacctccaactcttcagtgctcctacctgcagccctcaccacagcaatgtcctttcacctggtctcatctccttcagtctcgttcccttgcatgtaaaatgctggttctggatcaatttttagatcagacttgattagcaagtgcatcctgattctaccacttatttgattaaaaatctttcaactgaatcccattagccaaagaacacagtctgacagccaaactctgtataatccagcattgaaggccctctgtagaagaccccatcctgttttcccaatcctaattctcattattctccttcatgtgccctattcttttctcagagttatgcttgcccatgcatataatgtaaattcttgcccatttagccttggatcaagagattctttcaggctggaattgccaatgccaattccatttctacatggttttattctatttatgcttcaagacccagatccaaatcacctcctccttggaacagttgagatcctcatagcccaaagtaatcttcatctttttgcaaaactgtaagacgtttctgcctcttttactgaacctatcattttctaaattgcgtcatcattatttatctatgtcttactactaatggactatcacttatctttttctacttaaatactaaatatactttcttgaatattgaaacaatatgtaataaataaatttatcaatccattcataccctcagtcatcgttcttctgtgctacgcatgccaataagcttaagtggtttccttaagtaacagtcagttcacactggaatcaaagctgctcaaactccacaaactccaaccctctcttgagtttgcaggcccatttcagattagcagaatcattagcaacatgtggtgaagcactgcgtattgcttacgtttcagaataattttgtcctatatgacctctgtgaatatatcagggactgggcctttggaagcatttcaactttgggaaatgtctgactatgcaaatactctatagtttcgcctgacttagaagctatggacaggccaagcctgacctactaagtaatgtgcctgtaacaaaaatcaccctgcacgtttgctatctatccattggatttacagacagggttcaggagagccaccattgttcatgtttactgccaaggtccaagtacaaaatcttagcaccccctaatgttgaaagcagtcttttcaccgtgagcagaaaatggaatgagaaaaatagactgaaggccaatcccagcgaagtttaactttggaactagccatgacctatatttgtgtagaatacaagctttatagacattaatttcagcaccagtttaatccctgttcctactagggctattttgagcttatttcaccatttctttcaaaattgtcaataaattgttcatccctttatgctcttcttaaatcatttctgagctgtctgcttaggccatggagtagacaaaactaaatcttatgttctgaggattgtttttttgtattcttttatggtagaccgtttaatcatcttgagattattctttatctctcctttgtatttttattctgaattataaaatttttatctgaaagaaggcctttttcttctataaagattttttcctttagcttctcatgttttggaaaagaaaaagttaaatatagagtgtggctgaatataaactggactgcagtgttaaatgcctctcagcctctttctatcacactgtgtaaataaaagatttgttggcagcaattttcttggtttgttgggtaaattcttcataaattcagttttcagtctgacagtgttcatgaaagcggaacataaaagtaaaacatatgcacattttccaccagctttattatgcaaagtacttgattttgtataaaactggatttttcaaggccaggaaaatcttcaataaatcacatcagcaatcccaaaaacgtctgtagaaccctatgtgttttcccacttctttcagcaactccgtgaataagaaggagacacctgaaggctctgctatggaagcaaagagcgagggaggcaaagatagagtgaggaagggaaagatagactgagggaggcaaagatagagtgagggagggaaagatagagggagggagggagggaaagatagagggagggatggaaagatagagtgagggagggaaagatggagggagggaaagatagagtgagggaggcaaagatagagggagggagggaaagatagagggagggagggaaagatggagggagggatggaaagatggagggagggaaagatagagtgaggaagggaaagatggagggagggagggaaagatagagggagggatggaaagatggagggagggaaagatagagtgaggaagggaaagatagagggagggagggagggaaagatagagggagggagggaaagatagagtgagggagggaaagatggagggagggaaagatggagggagggagggaaagatagagggagggagggaaagatgatggagggagggaaagatggagggagggaaagatagagggagggagggaaagatagagtgagggaggcaaagatagagggagggagggaaagatagagggagggagggaaagattgagggagggaaagatggagggagggaaagatagagggagggagggaaagatagagtcagggagggaaagatggagggagggaaagatagagggagagagggaaagagagtgagggagggaaagacagagtgagggagggaaatatagagggagggagggaaagatggagggagagagggaaagagagtgagggagggaaagacagagtgagggagggaaagatagagggagggagggaaagatggagggaaggaaagatagagggagggagggaaagatagagtgagggagggaaagatagagggagggaaggagggagagatggggcgggtggggggaaggaagaaagaaaagaaaagagggagggaggaaaggagggagcccaggagggaatgatctgatcatgttctcagagtgtgacagaaaatggaaactatgttctttttaaaaaccctccatgtacaatgtaaggtcggttctgtttggtctgcatagtgatgtctttgttttaatgcagggcctcagcaaggatgtggtggttatctgacaggctcgaataatacctttgcctctcctgattctgattcgaatggaatgtatgacaagaatttaaactgtgtatggatcataattgcacctgtaaacaaagtaattcacctcaccttcaatacatttgctctggaggcagcaagtactaggcaaagatgcctttatgattatgtaaaggtaaggctgttttatttttttaacagagtctattcatcccagactctaatatagtgtattccagtttatatcgttacaggaagtcctgctaattttgagtacaggtgctactgctttttaaaatgaccttttcttcagtgatgctacatttaatattatagatgctctatcttcatatcaaattaatctttaatatgggtgactcaaatattttgtgtgactggcttccaacattagcatttaaatctcctattcatcaatgtcttgcaaaagacgatctataggaaggtcggttttctggagagagatactcaaaggacctttggcaaatcctaaaataaacaatgtcagtgacacaaataatcacctcttaatttgtctatttcttaggcttatagatttgcttatcacattatgtttagatattaaaatggttctgaaatcccattaaaagtaaataaaggctgggcactgtggctcatgcctgtaattccagcaatttgggacaccgaggcaggaggatcacttgaggccaggagtttgagaccagcctggccaacatggtgaaaccctgtttctactaaagacacaaaaaattagccgggtgtggcggcgggcgcctgtagtcccagctgctccagaggctgaggcaggagaatcgcttgaacccgggaggtggaggttgcagtgagctgagatctcgccactgcactctagcctgggtagcagagcaagactccgtctcaaaaataaataaataaataaaataaaaaagtaaatcaagaaacttctgttcaatttttaatgactttaatattaaattattatacctatcaggttatataggttcagattacaagtgttaagtagcatcaatcagtatttactactgcactctcaggggaaaaataaaaagtatggcaagatttgtatttatgaggagcttaagtctgattagaaaattatgggatgacacatgcaaattaagaatgcatagttcaggatagtcagcatttaagcgctaatgaatgcattcgatgcaggcttgaagcaatgtgcaagcttagaaggaaagaaagttcatgaaactcgtgtgatcaagaatgacttgatagagcgagggaaaacttactcaggtcaggagagaattcaggcaaggtgaacattttcaaaaaggcataggaattgatacgtgcatgttctcgaaagcgtaaagaggctggctgtgttgaagcagaatagtgctaaagagtagcaagaaataagatggcctacatagagaaataccgagattacaaaggatcctgaaagtcaaactaatgactttagactctgtgcgggtgaaaataaggagtggttgaaggttttccaatgagtgaggtgacaacagcagtagctagggaagactaacctgaaatcagcagctgtgggaactggaaggagaggaggctgggagggctccagagagaggtccctcctaggtgagaaggtcagtcttagacctggatcaggggtgcagccatggcggtgatggcaagaggggtgcaagagaaacttaagttctaggattgcaataaactttagagaaaataattttaaaagaaaaggaaggaaaatttgtggagggaatacccatttgagcacttagttacatgcttttgtttttactatgaaaggggctaaggttgggaggccagaaaaataacagtgtggtttggtgagagcaagacagacaagtgagactgcagtgggcagagaatggaacggggctccggtgagaagacagctccacgaatagagaggacacagcaaagagccttccttccatcaggagaaaggatgctttcttagagggagtcagcatagatttcagagagtcaggctctcagctccaggaaaagtacccagggaggcaactggagaaggcaaaaggcacaggaaaagaacagacgcgtcatgaaaagataaatgtgaagaccaggaatagtgtagtatccctgaagtcaaggggcagggggattcttttacaaagcatgggtggtcaatactattgaattgtaaagtagaggccaagaaagggaaagatgaagaacagcctcattgcactggatgacaaccatttaaataaagtattggcacagaagctggatcagaggagttcatgaaagactaaagatagcaaggaatgtcaattccagtttaattctcctttcctaaaatgagacctggccggccgagtgcggtgactcacgtctgtaatcccagcacactgggaggcagaggtaggcagattgcttgagctcagaagtttgagacaagccctggcaacatagtgagaacccgtctctacaaaaaatacaaaacaattatctgggtgtggtgctgtgcacctacggtaccagcttctcgggagactgaggtggaaggatcccctgaacccagaaggtataagctgcagtcagtcgtgattgcatcactgcacaccagcctgggcaacagagtgagatactttcgccaaaaaaaaaaaaaaaaaaaaaaaaaaaaggctgggagagaccaaaatgactagagcagtcctaaagctgaattcaaaactgtttgagagctctcctggctttacagaaaggtaataaggtttagagacggagagtatggggactctaacccaattttgctgtcagacaaatttcctaatctccccgattcctcatcatttcgtcaatttttctttaaatcacataatagtacctactgtgaaaggcagttttgaggattgaaattatgtgtactagagcgtttagcactgtgcctgacataaattgtaaacaaatttacctccctttttttccccgttggagtaattccaaataggcatgggcactatggaatttctttttcttaaaaactaaaaataatggatttgcatataaaattacaattttaaattcttatagaatgatttgagtatggccctgctaggagagttgactggatttactctcaagatccatttttatggagtgtgatttgataatgtcatcaaaacagcctgtcattgtctgaatttccgcaattcattcaggccagaaactgcaatatcaaaaacaaggagttattttcttgcttcaaaataaaatatcgtttttttcaaataaattctgttcagaactattcttgttttcccccttggaaaagcaatttccttccattggcaacgtttccaactaccactaaactggcagatcaaagaatagcccttggaatgtggagcttggagctttctttattaaagagatttttctgtgataaatgggacggttgattccttttagatttttttttagagattataatcaaatcactttttagaaaagctaatttaactgaactctgtggtagatacacaagtaaaatcataccaattccattattcattcataattctatcatgatcgtttgtgaaagggttgacttggagagtaattacggtaactgaatcacgtagtgaattgtgcatgtcactgagcagtctcttttgaaatccacatcgcatccattgcaggagttagttggcaagggtatgtgccaggccctgtaccagcatcactggagatgtagagagttaaagacatctcttgaagagttcaagcttcttgaggagctgctagtaaagtgtaggagactgacatgtaaacaaaaaacatacatttaaataattacatttaaagtacaaataaaatacatttttttttttagttggagtcttgctgttttgcccaggctggactgcagtggtgctgtcttgcccaggctggactgcagtggtgctatctcggctcactgcaggctctgtctcccgggttcacgccattctcctgcctcagcctcctgagtagctgggactacaggcgcccgccaccacacccagctaattttttgtatttttagtagagatgaagtttcactgtgttagccaagatggtctcgatgtcctgaccttgggatccgcccgcctcggcctcccaaagtgctgggattacaggcatgagccaccacgcccggccaaacacatttaaataacggacatttttttcacattgtataacgtgttgcataacatgacaaaaatcataaatagaaacaacatagaagggcagagcagaagaggctctgattggctttgttttggctaggaaaggctttctagagggtgatggctgagctggaatttacaaaatgaacagaaactcactcccttttgttatcctttacgaaactgagaggagcatgaacctagctgactttttctgccaggaagtatggaaccagcagagagaggtcctcatcctaacattgcccagtttttcctcaaccccatccgtgccccttttctttttctttttcttttctttttttttttttgagacagagtttctatcttgtcacccaggctcgagtgcaatggtgtgatattggcttactgcaacctctgcctcccgaattcaagtgattctcctgcctcggcctcccaagttgctgggattacagacatgcaccaccatgcccagctaatttttgtatttttagtagagacggggtttcaccatgttggccaggcttgtctcgaactcctgaccttaggtgatccacctaccttggcctcccaaagtgctgggattacaggtgtcactgccccttttcatagccaatattttgtaatccttcctttcccacctgaagtgaatgtcatctatgctataacctacccataatgtaatttcagaaaatcactgtactatcccaaaggcaatgaaaaggagaaataaaaggaaagtatataaaatagtgtgtcttcgtatatgtaaatactctaacactgctacacaaagtcacataataaaatagattccttttatatgtagaatggtggtgaataaaaagtataaatgtaaacaaatacgggtgggttatatttgcaacccgcatgccaatagcagcatcaccatctgcaagataagtttccagaatggtggaaaaactcaaaacaaacatttctaaaccaaacaaagtacagtcttccctcagcttacacaataattgcatttctggaaatttggtgcatatcaaaactgtgcaaaaatatttttgtgtttatatataaaatggacttaggttctgggatcaaataattataaacaagtttttttttacacaaatgtctgacaggacattcaaaagttatgtgggacaaaaatcttcactttgcaaaactgtcctgtgaattactaaatgccagttataggcccaaattatagtgatgacccaaaaaccaccacacttgtgcaaaacactccctatggggtggtattgacctcattgagaaggtctgacttaatgcaccgggcttaaccattcagtctgtgtcagacactggagctgaggaggggctgtccatctttggggagaggatcagcagtctatggaaggcatcacgttcctatccacatgaggtcgtacctactattcattcattctttcattcagttcagtgttaattagcatacctactatattctagacattgctgcaagaactagagaagaacattgagattttagaaaacaatactaggaaaactcctgctcttgtagagctgattctaatcattgcttctttgtggctttttcccagacatctgggactagtataacttttttctccagaagattctgaaatgggtcagagtttagccccaaactggaaaagtcactctctattcttcttcccatactaaattatgccctggcatgttgcccagcagacctcatcagaggttctgcaataagatcaaagaattcatgaagatactctaagattctgctcccagtaagaatatcaaaatcctcttgtgatcaaattcccaggaaaatattaaaagataaagtcctaaggatattaatgtatgaaattattacctttgaaaagaattgtagtccaatatcaaagtctattgcccttgtgcattaaaagttcatagaaattaaaatccaaaaattttctttcccagtttttctaactgctcaagtcaatagctgggtgaaatgtgggattttgccgtggttgtagcagagcctgcctgccactaagttatttgtacaatgccttcaggatctttagcagattctaaaatgatcagatttctaaaagttgagaaaatataacattcttctcagcacttacccacatccacaagacttagaacgtaattcaagctccaggtccatcgcagttgtgccaggaaatgtttgctcccagaatgtggcccgtagctgcgtataatggtgtagatcctaaaggcaccatttatatcccagtttatatatgattccccctcctcatcattggatagggcgtcccctgcaacgcattgtagggcaacctggcaaaagtctgtagtgaaggtttagtgttatcagagaacaagagagcagatagagatcttgggtttgaggcagaggagtttagagcctcctatgtcagttatcccgaggccacaagctatttcaactcacttaggagaaatcttactgtggcaatgaatgaactaacacaagaccagcttggggccaggtatgtatgtcatttccttccatccagccctggcttctgcctcctaccttccttcacatttaccagttatccatttaaaacccaaatctgatcttacatcacgtaggatcagatccagactccttggatgaaatgtatggaacttcacagctttgtttgttggacttcgtcatttctcctgttctctcaccctggcctccagggccaatgaagggggtcagaagttgttgacacgtgccatgcatttcacacttccatggcctggcatttattactgtctggctgggatacccttcctgttttgtaggtctggaaggtctttttttttttttttggggacagagtttcgctcttgtcgcccaggctggaatgcagtggtgcgatcttggctcactgcaacctctgcctcccgggttcaagcaattctcctgcctcagcctcccaagtagctgggattacaggcctgcgccaccacatctggctaatttcgtatttttaatagagatggggtttctccattttggtcaggctggtctcgaactcctgacctcaggcgatccgcctgcctcggcctcccaaagtgctgggattacaggaatgagccaccacgccccgcaggtctggaaggtctctacttacatttaagggccaacccaaatgtctgtctccatcacgtgggttctcatgatacactcccattattttattgtagcacttatttttctctattttgtatataatttatatacacatatatttatgtgtatgcatagtgtatgtgcatattacacaaatatatgtatttgtatatttaatttgtagacctttactctcctttgttcatgaaggggtcttatgtcttgaagatctggaaagggctttacatgtccttgtatgcctgggatctagcacagaggcctggcatacaggtcccagaataaaaatgcttgctaatataaatgtgatcataaagacagcaatgattatcatgaaattttaacttgtttaccagaaaaagtgcatgacctaaaacttggcaaatgtgctcttccatgaaacaaaggggtgaagattagaaaactcgagtttcatctgattctgaattaactaaaatcatgtttaagttggaaagacagtgccatctagtggtgcatttctttttcttttacaatgactggttttagtcattcctgtcttacataatcctagcactttagaataatgtcagtggtcatggtcatggctgttctgaggccttgaacacatagctctgttatgaattgaatatttggagttagatacacacagacactcattttagaagtacaatggagattactcagaagaaaacattttctagttatgtgtttcagggaaatccaagcacccactatttcgatggatgtttctagaagggagccatggttgggaattgttctgggtgctggcgacaccacagtgaagaagtcagacagagtctctgtctccccacacgtgggacttacatccttgttgggaaagagaccggacaaagtaaataaacaataaataagatcagttttgattataataggaaaataaaacaggatgatgctatgggagggcaacattcaatagcattggcttctctgaggaggtgacatgtcaggtgagggcccatgacagggagtccttagctgtgtgggttcagcttcacctgaggaaggaagagcagcaggaacagggctgtggacaggagtcctcctgggatgaaggaagtgcagctagcagtgaggtgtgggcagcctgggaaggaggcacaggccagagcagctggggcttgcagactgtgggagggagctggaattttactttaggtgcaatggggatctgccgaagcattttagacagagcaggagcatcacctcattggagtttgcagacatgcaggcagttcagtggagaacactatggctgctccggaattaggcctattaagaagatgtttcagtgggaacaggtgaaggacgatggagatcacctggagatggagccctctgggatatattttgaaggtagattggagtagttgtggagtgaagagagagagagaggaatcagagatgactaaagttgtaggcttgaaacattgaggtaaagatggctctgggagaacagttttgggagggctagtgggacagaggaatcaaagcacttgtttatttatttattagatatttattgagagcctctcacgtgcagacacttttctaaaaactgggaacatggcagtgagcagaaaagaaatctgtacattcatggaacttgtattgtcttcagagagaaagccaatgaaataagcaagtttagcctggacaacataggaagaccccatctctaaaaattttttttaattagctaggcatggtggcatgcacctgtagtcccaggtacttgggaggctgaggtgggaggatcacttgagcccagaagttcaaggttgcagtgagctatgattgcagcactgcactccagcctgggcaacagcgtgagaccttatttcaaaaaaaaaaaaagctaaatatgtagtatatagaagaaggtaacagttgctgtggagaaaaatcaagcaggaaaggagatgggaatgttgggagagtttacatctggaaggccttattgagttggggatatcttttttttttttttttttttgagacagtcttgcactgtcacccaggctggagtgtagtggcaccatctcagctcactgtaacctccacctcctagattcaagttattctcctgcctcagcctcccaagtatatgggattacaggggtgtaccaccacgcccggccgagttggggatatgtgagtaaagacctgaagaaatgcacgaggacaaactatgtggatatacagggaagagcattccaggcaaagtgaacagcaaatgccatacccaagaagcagcaacacacctggtttggctcaagaagcggaatcgaacaaagtgaagacaataagaaattagattagaaaggtcaggggtgggagaggagagaaagccattgtgatgcctttggctgtttgattgagtggatgggaagcagttaggaggatttcagcagagcagtgacatggtgtgacttacattttaacagtatcctctcgatgacattttgaggatacactaaagaggaacacgagcagaatcaggggcttcatgggaggctgcagtgatcatctaggcaagagatcagagcagttggggccatagtgtgagtcggtgcagaggttaaagtagcagtgggtgagcggactctcataacaccttcttttaaaaatcatatatttcccaaagaggaaaaaaatgttaggcgtcataacaggtttttcctgaaagtcataatataatcaatccaattataattctgttcctaaattaagactacctctaagaaaatcaatgtaaaaatgtttaccgtgacctattgcaacttcgcgtccaatttagtgtgaaatatgcaattttttgtaagtaatggagaagtaatgaattgtttttcttctcagttatatgatggggatagtgaaaatgcgaacttggctggaacgttttgtggttccacagtacctgctccttttatctcttctggtaacttccttacggttcaattcatcagtgacttaacattagagagggaaggatttaatgctacatacaccatcatggacagtgagtaaatagaagcatttttatatgttatgaaatacacatgtatttatgcactgaaaagaatgccctgcttattatatcgaaatttcaatgttaattactaaactcaatgtcaattactatctaaactcaatgtcaattgctaaacaccatgttaattactgtatgtttaatctgtggtacaaatttgatacaatctttagtcaaggatataaaccctgaattcttaatagagtaatgaaaatatagctcctccggggtgggaggcagggaagacagaattgcaaagattgcctgagatgagacatgaataaaatgtctcctgtgttgctttttcctccctctccagtgccttgtggtggaacatacaatgcaacttggaccccacaaaatatttcatcacccaattcatcagacccagatgtcccattttccatctgtacttgggtcattgattcccctccgcatcagcaggtcaagataactgtgtgggcattacagctgacctcgcaagactgcacgcagaattacttacagcttcaggactcaccgcaggtaacaattataagatgaatggcagtcacatctagtgaccttttcaccagtatttgcaaaacacttgaagtaatgaagccatgatgaaataattttcttttttttaattatactttaagttttagggtacatgcgcacaatgtgcaagtttgttacatatgtatacatgtgccatgttggtgtgctgcacccattaactcgtcatttaacattaggtatatctcctaatgctatccctcccccctcccctcttcccccaccccacaacaggccccggtgtgtgatgttccccttcctgtgtccatgtgttccgattgttcaattcccacctatgagtgagaatatgcggtgtttggttttttgtccttgcgatagtttgctgagaatgatggtttctagcttcatccatgtccctacaaaggacatgacctcatcattttttatggctgcatagtattccatggtgtgtatgtgccacattttcttaatccggtctatcattgttggacatttgggatggttccaagtctttgctattgtgaatagtgccgcaataaacatacgtgtgcatgtgtctttatagcagcatgatttataatcctttgggtatatacccagtaatgggatggctggatcaaatggtatttctagttctagatccctaaggaatcaccacactgacttccacaatggttgaactagtttacagttccaccaacagtgtcaaagcgttcctatttctccacatcctctccagcacctgttgtttcctgactttttaacaatcaccattctaactggtgtgagatggtatctcattgtggttttgatttgcatttctctgatggctagtgatgatgagcattttttcatgtgtcttttggctgcataaatgtcttcttttgagaagtgtctgttcatatccttcgcccactttttgatggagtggtttgtttcatgatgaaataattttctaagttacttccagcttaatgtgtttttcatccatacacaaagccctccaatcaggtgtgtcgagaaacttgaacttggtcctgcaggtccagagctctcaaagcttcatgtgcctaagaatgcattaagatgcatcttaaaagtgcatcctccctggcccaccctcagagaccgaatcccccatataacacccatttatctgaatttttgacaaacacctctggtgttttggtgccagtaccagaactccatggaccatgcttggagaaatacctctagttagtgggatttatgtataggttgaattgaaagggtcagtacagaacacaagagaatcagtgaagaggctgtttggcactagtctgataggtttatattcatggtaatataagagagataaaaagaaaagggctgggtgtggtggctcatgcttataatcccagcactttgggaggccaaggctggtggattacctgaggtcaggagttcaagatcagcctggccagtgtggtgaaaccctgcctctactgaaaatacaaaaaattagctgggtgcagtggtgtgcgcttgtaatcccagctactcaggaggctgaggtaggagaatcgcttgaacctgggaagcagaggttgcagtgagccaagatcgcgccactgcactccagcctgggtgacagagtgagacttcgtctcaacaacaacaacaacaaaatccattttgagctttaaaaaaggctgagtctgaatttcctctggaataagatgttgaggagacagttggacacaaagtgggttgttgaccaaaggcccaaagatttttgtgcatcatcattatcatgataggtaattgaaaaatgagaagaatgagattatctggggaaaatatgcaaagggattggccacgaactgaggatggataccaggagaacatctgagaatacctggattgtctttctgcagtttggggagcaactaaccctccccagttcattccagtaaaatgtcatggtcaaagccccatatgctggactagtagagtatctgttgtcttctgagttttcagggtccccttcattataaatctggggtcccctgcttctcatgtggtcttgctggggaaagaaaagtccaggttgtgtgactccagagtggagaggcgtgagatgtgctggcagctgaatagaccctggacttgctgagtttggtgcaaagcatatatgctgagatgagctcccaaggtggacaagatgctagattatcgtcattccattggtaatggttttcaggacaaaatctctattacccattggtaccctagaggacttacagccaagtggaacaggccctttgggtgaaagctctctcaattttccctggcttcacgaagctaagacaatggggatcagggtggaccactcagcggggcacagaatggcactttcagggcacgagacaccgtctgaaacataacagcagctggagcagcctcgagtaagacccagtgtttgtcatgactgaataatgttttccactgaatgaatacaggaaacaatcaagggtttcggactgggtaggtagggaggaaagacaaacattgacggatgagctgggagaaactgggattctcggggtatccaagagtagacagagcagccctaattggcagatcatgaaggaatgatgtgtagggtggttacggaggatgttcagtggttagctggcactggagatgaacagagatgcagagatagaaggccctaaggttaagaaatatgaagttgagggtgtttaatggcttgtctataaaaacacagaaacctctaaagggttcagaaaggaaatcaggggcaggagatgactatgagctgagacacctcaagtctttcataaatgaagggaagtaactgggagaaaagtaaatgagagtgacgataatggtaagaatatctttggccagatgtagagaccgtcgaaggagaaccagctttgagacgaggatggaagctgcagtgaggaatgtggagcctccctcccttcccccgaggctggccccccacccttcccactcaatgaactgtggagcatgggtaaagaacagcctctaccaggaggctgctggagaaccaggttttgctaaggccacaaagtggaaaggtgggggatgtataccgagaatgactgacagtgcagttaaagttcacaggatacagcaaagttagacaaggaccaagagcaggagacagtggggaagaggggtggaagccccgagcagttacaggagttttgcaagcagagacgggtggggtgtttcagtaggttcctaagaactgcagatattagagacattcctgtgacagggaggctgcaaataccctgactttggtacaacttgtttttacccaagaactgatgggcattcgactgcatttactccaggcttttgagaggtgatgagggctgccctagtgttacaaaggggaaccggtacctcatgacaggccccggctggcttgggggatgtacagtggaaccaaaggctctgattagatttgctaaggggtagcaagggctggatcagggtgatggtggttgttagtcccatggagctcaggacaatggcaaaagccccaggaggagagatccagtgagctctcaaacagcctagatcctcagagcaatggcacaggcctcagctaggaagttgcataaaaggcgagggatcttattttcagcagggaaatgtctgtggtttcagcagaagctttgcctcccttcctcctgcccctctgggaaggtgcaacttgcatcaattccaaggccaacgtgagtcttcttgcagagcacttccaacagcagagctggtttccatggctaaatatttacaccatgcttttatatgcagtctaatttctgttatggcctgttctcttctaagactaaatctaacatgatttggctcccatttcatttcagggtcacggaaattcaagatttcagttctgtggcagaaatgcttcggctgtgccagtgttttattcttctatgagtactgcaatggtcattttcaaatctggagttgtaaacagaaactctagaatgagtttcacctatcagattgcaggtgaggccaggaacttcatcttttattcaaaaaagctgccatcattaccattattcgtagaataattacaattatttctagaattgactcctgtgagtaaattaggatttgttaacaaaaaccacatccctctcttaactagaacccagcccaatttagcaaattactacagttggtttctaaagagataaagagaatataatactatccaggatggttagaatgctagcattttcttcaaagtatatgtagttgattttaaaaatatgccaattatcttattaattatacacttaaccacattgaatatacatttttatttacaagaaatatatatgtttatttacaaaagctttatcaaaatataattctcatatcatacaatttacccatttaaagtttatatttcagaggtttttagtattttcacaaaattgaaaatcttagaaaattattttgtaaaaatcaaaaagccttgaaagagttacctgattattataagaagtttattttcacagaacactttatttagtacttattttgaattgactcaaatgaaagcttcctttggttaaaacaaacgaaagtacttttggtatttttttaccaaaaaaaaaaaaaaggtaaataacgatttgccacaaataactcaacaatggatttaaaatccttgtgcaaaactctgtcttggaggtagcatccttgtcgaaaagagagtctgaatgctacttccacctcaacgtgatcagaaaagttcaaaggatgctcgagtattcgtctttaaaggagaagcctcctgtgtcatgcttcctgtaggcgtgtttgtgtgaacgagctgttgcattgcacctgtgtgtgctgcttgagcaattcacttcactgctcagggtctcaattatctcaaaggtaaacgaagaagctggattacttttttctaaagtttatcaaatgcaatgatctttttgaatgattcctgtgaagttgaaagagcactaaatattggaatgcgtacattaattatgcctatttttcctctaagattgcaacagagactatcacaaggcatttggcaacctgagaagccctggatggccagataactacgacaatgacaaggattgcaccgttactctcacagccccccagaaccacaccatttccctcttttttcattcacttggcatcgagaactcagttgaatgcagaaacgatttcttggaggtgatatgcatttgaatatcgtttgaatgaattatttaaaagatggtggatcacttaagattttacaccttttatctagtgctgctaatattatatgattcttatttgtttcattaatttattcattaccctttcattccctaaacatctacagagcaccagtccaaacaccggaaattgggaaccttagggcccgcaggagactcctagtctggcaggaaggacagatggggtatagccaattacagcacaatgtggaaaggactaactgagtccagcatgggttggggttcctaactcagtctgggaactagaaggctcaagagggcaatatgtaagttgagacctaaaaggatcagagggaagtctaaggacaacatgctggttctgtaaaatgaagctcaatgatactaaatagctcacctaattttcctgacagctacagtaagtttggggcatcgtcaacatcctctaaagacaagtgtttccttgaataaatgctccctggtctcaggggggtgtggtctgtcctttcttcaccacaactccagagcttgaatttgggcacagaaatgacttcactgtttgcccatcgtccacacacccaccccccactcccaccccaggacacactgagagagaagcccccttgtgcctggagcaggcagaaccatgcgcctcgtgggcctgaaactttggggtcctccagtgcccccgatgagctccctctgtgctctttctgccccatcgctgcattgggcatatgagatggaacatgaacatcatcgctcataggcaggagatagtctgaataagcctcatgtgatgtggacccagtgtgtggaactcagcccctgtgttttgccagaaaaaccccagagctcacggggtttgagctttgcaagctctgtcgaaaatgcattcatccttaggaaatatacttaggtggaacctaaaaaccaagagcataaagatgctgagttcctctgtgagtggagtttaaatctaaacctcatcctgaccgtctctaaactggctttgtaccacacaagagtcttcagtaaagtttccaaaaagtgtgcttgttcctctacccctgatctggagttgtattttttattttattttttttctcactgcctctttaatcaggtcttcattcaaaataagctgcccaagaggatttgacctttgtagcataaagaaatgtaccggtgtaggcagcgggctcctttcattctgtgggacgattctttctagcgggcctctgctcagctgatagtttcttggtagcttcagcctttgttcccaacaaaacatcttctgcttcttagcaccaagggctttctttctttcttttctttcttcttctttcttttctgccctgcaacccccctcatccgatttggctcctagggctgctggcaccttctgcccagcctggccaggaagggtgttctggcatatggtctttgcatatgggtttagcttcaacatgattcctgatgcggagttttatcatcctggaaagctctcccctttggaattcatctaaatcctttattaatcaataaccttaacatatagtgccataaataacactcggaggaagctcatgccttttctaaaggaatactcgccacgacaggagaccgaaagatgtatatagcagggaggaaatgaagaggcaaatacagttattctttgtgccggtcaggttattcaacttggacctgtgtacctcccccaccatggagatccaaatatttatatgaagtgtaaagcagaaagaatgaggagagtgggatctggaggaaagatggaataatcccgttaggttggagtcacagtgcaactaactcttaactcactccagcttgaatggaccattattgatcagagtcaacgtttgccatttgcctgatagatgctgggaagcaaagccttgctttccagccgtggagagtgagaattcctcctcctagctgtccttcattactccacagaatggatctgaaacttcctgtcccataagcaaagaaaggaaaccaccgcttaggcctgtaaaatgtagctccatctggctctcagtgggaaggctgtgggcatagtttcttggcagctgtaccaggaagcctcagcattccgttcttgtgaactgcggtgggaacggaaatgtctgactgagaattctgactgtgttactaccaagcgagggccgagctctagaccatgcttggaatctgttttcatgccttcacctcccctttcaagatcctctgatgtcccagagatgcccactgctctaggtggccccattcttcctaggagaggaaagtgaataagacaagttgtcagcagtgtcagtggaaattagtatcctgctgctcctctcagagcaacggcattttgaaagaggaccctgagggaaaaacgcccaaactcaaaagcgtggtgctggctatggcagccctcccatctactagtggatgactggctactctgtcatggcaaggttactttgtttaaacacttagcagaataatccccaaagcactagaaaggcattattctctcccatgggctactacatcgacctaaaaggaatctcacctgatcaacacagcccagcaagatgtcttaactttgtgacttaagataccagcaattaaccaaagtttaaaccatggaattatatagggaacagaggaacttccaatattttgaatacatagatcagtaaaatcagcatttccgcatgtcaggctggttccaacatacattgcccgcgtaacgtttccgtaagaagcgtcgagagccctcctggaagcagggctggttgtgaatgcagggtagcagccaggctgggggacagaaagtggttcagttcacagtgtagttctctctccccataaaacacaggctcatctcctgtttttatatgtgtctactcaaaaatgagttgaaacaaaaaagcaacaaggcctcggaatgtgtttgtaaaacacatttaacaacagacattgtatagatttataattctgtcctttgcccatacagaaattcctttcgttctgaactttattatactttgcattgtattttttcatagcctctttacagccaagtaattttcaatgggaaacacgtgcacacacacacatacacaaacacacacacaatgagaaaggtgtaatagttgactggaagcagagcaggcaacattgcccccgcccatctccaccttttaaaaattcactttacctacattctccagaatgtttccccaaaagcaaaggctgcaggatcacagcacaaactacggtataaaaaagctgcctggtgttttaattgctgtaggttaacaggtatttctgaatccaaatgcaaatgttttttgatctacacgtggaacatttttcccctttgcaagtgaaggtgacttctgcatgtattttcagaaaacgcttcattcttaactgtataaaaagacaaagcttttccgaccaatgtcatcattcaaattgtctccattttaatgtatataccttagagaagaaagtgtaagtttaataatgaatgactccttcctaaaggtgagaaatggaagtaacagcaattcaccattactgggcaagtactgtggaactctgctgccaaaccctgtcttctctcaaaataatgaactatacctacgatttaagagtgatagtgtaacttctgatcgtggatatgaaatcatctggacttcatcaccctctggtaagacatttgcactttgtacaggaaagcactgtgagaaaaacatgaggtgtctaatagtaaaaggcaaagtaactttatatttttagctacctgtgtacctgattagtttatgttaagaatagagattttaacattgaaagtacagattacttttttttttttgaaatggaatctcgctgtgtcatccagcctggagtgtagtggcgtgatcttagctcactgcaacctccacctcccaggttcaagtgattctcctacctcagcttcccaagtagctgagattacaggcatgcgccaccatgcccagccgatttttgtatttttagtagacagagcgtttccccatattggccaggctggtctcaaactcctgaactcaggtgatccaacctcccaaagtgctgggattacaggcatgagccaccgcgcccggccagattactttaaattttacatttattcattatttctgtttataaaagaatatatattcatatatgaaacatatataaggtaaggtaggaagattcaaaaattccttggtaaattaaattttgttagactttttgacttttggcttgaccatcaaggaagttctttgagaatttaaagaaaaatttttaccaaaaatccaacttatgaacacattctggcatatatatgagtagttgtgcttctcgcaggccctgacatttcttggcggttctggagagaaattgctttttttagggtagtaagtatcttctcacatttttggctggctgtttatcaaacaactaaagaaaatttaagtcatgtcaatacatttaattcaagagaggaggaatacctttataaaatatcccaaaataccaaaataccttcaaaataagaaagataaacagaactcactttaaatatcttaagaaaagcgttctataaagataatcgtgggtaatggaatcttggcacccaaaggaagcttaaaggtgacctccaatgctcaaattttatcaacgagcaaataaaacaccaagattaagctaggtgctgtggctcacacctataatccctgggagaccaaggtgggtggatcacctgaggtcaggagttccagaccagtgtggcccacagggtgaaaccccatctccactaaaaatacaaaaattaactgggtgtagtggcacatgcctgtaatcccagctactcgggaggctgagactggagaatcacttgaacttgggagatggaggctgtagtgagccgagatcacgccactgcactccagcctgggtgacggagcaagactccgtctcaaaaaaaaaaacaaaacaaaaaaaacccaccatgaacccgggaggtggagcttgcagtgagccaagatcgtgccactgcactccagcctgggcgacagagcaagactccatctcaaaaaaaaaaccaaccaaacaaaaaaacccaccaagattaatgagttgcccaaaatgctccactagactgaggtgaaggtgagattagacctcagtggtcagaggcccagccacgtgctctgtaactatgccagccagcttcttcctgtcccagagatgacctggatctccacagatatatagtctaaatcatgacagccttcatatacagattaacaaattgaacaaattaacaccaaaacttgaagtatttgaccttaagtatgtcagttattagcctggtaaagtcacttttataatgaagtcattcctgccgtcacctacaataacgcactccctcttggtttagtgctgaattttacttctaattttacttcactcacatcactggcgtcaactctgggcatgcaaagatctctacaccatcgaaagcacacagacaacaacttgattttctcccacagttactttatcaagtttgttttttttttttttttccattctgctctcaacccccaattttcaaagtacagtcctggaggaagttatccctgggttgtgatatgcaggcaaaggcacgtgtgtggaggatggaagaggtggaggtggcagtgggaagagaggggaagagaggagaaagggtgtagcccaaagaagaggaaaaggaaaagggatttctgcctccattattcttgcagagtctcagcaccttaagaaaataaagtcttattgcctaacaagccagactggacggcttatatgctgttgaatcaaacttcctgtcctgttttccttgcaggatgtggtggaactctttatggagacagaggctcattcaccagccccggctatccaggcacatacccaaacaacacgtactgcgagtgggtccttgttgctcctgctggaaggcttgtcaccatcaacttctacttcatcagcattgacgatccaggagactgtgtccagaactatctcacactctatgatgggcccaacgccagctctccatcctctggaccatactgcggaggcgtgagtaaaacaaacattttatattcccatttgttatttttagacaataatgagtcacttagtgtagactttttttttttttaagatggaatctcgctcttgtcacccaggctggagtgcagtggtgcgcgcaatctcaactcactgcaacctccgcctcctgggttcaagcaattctcctgcctcagcctcctgagtagctgggattacaggtgcctgccaccacactcagctaatttttgtacttttagtagaaacagggttttgccatgttgaccaggctggtctcgaactcctgacctcaggtgatccacccgcttgggcctccgaaagtgttgggattacacgcgtgagccactgggcccggcctagtgtagactttcaaaggcagacacactgcagaggaagaagcacagcctttaacaaattgagcagttttccaacttgcctttctattatgggagcatgagtgccatctggtgggcattgcattaaattactattaagagttacaaaaatcagccctgcgtcagaatcacctgtggagttacttacattagacttccagttcccaccgaaacccactgaatcgggatttcccagggaggagtcacagcacgctgtttttttaaaaaaaagctccctctgtgacgtcagtgcactgcctagggttgaatacccatgtttatttctgcataaatagaactgtagaaaatttggacacgtggctctattttatctacttcttgctgaaaattgcagaaattatttgaagaaatggtgaccgatagtttgtttttgtaaagctctgatatcttccctaaaaaaatcagaatctgacgttgattcaatattgcaggcatctgtgcttacgatcctctcatttgatgtgcaagtagatacttaaagagagtaagggctcacacctgcaatcccaacactttgggaggcccaggcaggtggatcacttgagctcagaagtttgagactagactggccaacatggggaaaccccgtctctactaaaaatacaaaaattagctggtatagtggcacacgcctgtaatcccaagtactccggaggctgagggaaaataattgcttgagccagggaggcggaggttgcagtgagccgagatggcgccactccactccagcctgggcgacagagccagactccatctcaaaataacaagagagtaagtaagggaaaattggctgttggcaagcgggtatctgtttctgatttttctgccctttaatcacttagactttgtaatcaaactagacagagaactgtatcagctggaaatctagatggtttttaaaatataacttactatttataaaattgataaatgctgttttcagaagtatcagaaaataggctaatttttctaaaaccctgggcattctcatatattcttaacacctttctttgaatatatttgcatatattttacatgcatattttttactgtttgatggtgtgttttttctacttaccaatatatcattagtaacatatcaataaaaacactgttgcatcatatttaagttttggagagtattccgttgcacgagtgtggcctaatttatttaatgaagcccctctaagtggacatttaggtctcttgaactttttgcaactacagacaacacttaataaactttttggtagtgatatctttatacatatagttacattacttggtgagaaatggtaatcacaggaccagcagacactgtatcacggggatgcacagaaggcccacagagagagagaccccagtaaatgtgccacacatcagatttagaagctaatcagctcttagacattgaattgaaatttacaaacatttcaaaagggaggaaaagaggcaattttaacaataccatgactttatattggtaggggtttttttgtgggcatggttttcagtggcttgcaaacatacaaccccatttgatccccacagtgacactcccataaggtggaaagaacaagtatatcctggacttgtataaaccgagttcaggtttatactgaacaagtataaaccgagtcactgagagaagtgacggccatttaatccaatgccacgttaagttgaagtatatagcgagataacatcaatttttttaactgttggtgtttacggtattttcccagttttacatttttttataaatgtggatataatttcatgtgtaattgttttttttcttaaaggtaccactgatttctttaacactttatcaatgttaaacataaatgaaaaaatgtaaaacataagtataaaacatgaagtacagaggtagctcttgttttgctaatatttacatacaactttttgtaagttgtaatattttactaatatttacatacatactttcacatgttacatacatacatatttacatgcataattacatacatatgaaagttgtatacttttgtatgtatactccttaagtatacaattcaactttttatgtatgtaaatatgtttgttaaacttgtaatatttatatacatacagtatttaaatacatacagtgtacatacagaggtagctccttattttgctaatataaacacaaaccctgatttggagatattttatattacggtaaataccattgttcacagggaaatcctatatcccttgcagctgcagaaaatgaagatctagcaaatgagagaataacgggacaaacaaggagaatcaaaggagattctaaaacttctgttgaccgtctgttgacatactagtttgtcaaaataaaagaagttattgaaatttggaagcagattaaaatgggagtaaaaagtagatgtgtataggaataaaaatattgtatattccttgatgtatctcttacagaaaaaaaaatctacactcacttgagtaagtgagtatcttggaaataagcctgtgttttgatgacttggggtagggctgaggcaggagaagccagtcatgtaagcatcatgagagcagggctttttgcctgttttgctcattttttaatgtcttaatacctgcagcgtggcagtgccttgatcaatatttgccaaatgaatgaatagaaagtgagagacaacggggacccatgtatccccccaacacacacacacacacacacacacacacacacacacacacacacactgttccacagaagtatatgaaaataaatctcaagaggaaaaactataaacactgaggatgaaaatactatattttacttaataggatcattttaattatatatgtttgtttcagaaaaattaaatttgcagtaagaacttgaataagaagttcaagttttttgataacagttttattgagatacaatttcaataccatccaattcatctccttaaagtatacaattcagtggtttttcgtaggttcacagagctgtgcggccattatcagcacagccaattttgggacactttcattaccccccaaagaaacccagtacccatttgcagtccttccccattttccctcaactccccacgcccagaaatattcctttgtaaagcatttgcattcattctttgcaaggttacttcaagaaatatatgcaggttcaccataaattctataaagtttctttatgtggtactttgttactaggctaacattcctagaaaaacgttcaaatatgtgaaatatataattggatactttttttttcaattttaggacaccagcatagctcccttcgtggcttcctcaaatcaggtcttcataaaatttcatgctgattatgcacggcgtccatccgcattccgattaacttgggacagctaagtgggtaacaactcgtgttcactcagcactttccctctgcagcacgctggacagcactctgccatcctgatacatgacccctgctgatgccacagagaataagctgaacttgtatggtttttcaccaaaccatggatagaatcaatatttgtaggccaggcgtggtggctcacccccctgtattctcagcactttgggaggccgaggcaggttgatcacctgaggtcaggagtttgagactagcctggccagcatggtgaaacctcatctctctaacaatataataattagccaggcgtggtggtgggtgcctgtaattccagccactcgagaggctgaggcaggagaattgcttgaacccaggaggcagaggttgcagtgagctaagatcacaccactacactccagcctgggcgagacggcaagactccatctcaaaaaaaaaagaaacaaaaaaaaccagaatcaatatttgtacattttctcgaacatagaatatagcttctttagtcttgagtgtgcatttcattctaatattttgagctgaaatttaaaaaaactttgaaagagttggaaatgattatggcatatgtgacatacatttttaaaagttaataataatagccaggggcagtggctcatacccataatcccagcacgctgggaggccatgatgggaggattgcttgaacctaggagtttgagaccagcctgggcaacaaagtgagacctgatttttacaaaaaatcaaaaaattagccaggcatggtggcatgcacccgtggttccagctacacaggaggttgaagcaggaggatcacttgagcccagtaggttaaggctgcagtgaaaccctgtgaattaaccactgtactccagcctgggtgacagactgagaccctatctcaaaaatgacaacaagaacaacaaaagttaatgataatatagaagcataaatttcctgtgaatgttcaattacacataataaacattattgaattgtacacaa

SEQ ID NO: 68 - DNA, 215539 bp, Mus musculus
  source 1..215539: mol_type = genomic DNA
tggactcagctggccagagtggtctccctcttgccggcgaggtgagcgggggagctgcggagcatggcctcacattttctctggggttttgttactttattgatggtacccggattagacggtgaaactggaacaccagagcagaagctacagaaaagaattgctgatctccaccagtaagtataagcgtggcttatttctgctaagggactggagtctatccttgctgtccgtaacaaataacacgagaagtcaaagtttctcaaggaaagtagcgatgttaaaaagcccctggggagaagatttgggctggtataaagaactgttttctgatttacaaatggtctttgttcacttgtgagtgagtcacatctgcgattcctgggaaatatatcattaagaaattctcagagaaataatgatagatgaatagagacggtttggttggattgagtgtgaaatgaggatatgtatagcaagtctatcattattccgcaagaaacttggtttaaaatttaaaactctatgtgctaattactgatgaattctctgctcaaattgtataggcctcggatgactacggaggagggaaacttagtgtttcttacaagctctgcccaaaacattgaatttagaactggttccctggggaaaatcaaattaaatgatgatgaccttggcgaatgtttacaccaggtaatgcactgggaaaacacagctcttgctttgttaatcaatatatactagcttaaattgaccagctcaatattagtcagcaccttgaatcctgagcacagaaaacacaaccataagatcaggtcttaaaaagaagccttatgctggagagatggctcagtggttaagagcactgactgctcttccggaggtcctgagttcaaatcccagcagccacatggtggctcacaaccatctgtaatgagaaaaagaagccttataaagacttcatggtgaggagagaggggtcaatgccagaagaggaggctcattgcttagggacagatttcaccattcagagaagagccagaaagtcagagctcctctaccagagaggaagtaaggaggggaccagagcaggcacagatgcgttctatagggagggaagatgagttctgcatagaaggaataaaggggaaatagagcaggcacagatgtgttctgtgcagtgtgtgtggggcaataaggaggggaccagagcaggcacagatgtgttctgcagggagggaaaagggagaaccagagcaggcacagatgtgttctgtgcattgtgtggggcaataaggaggggaccagagcaggcacagatgtgttctgcagcactattgccacagcagagtagtcagttactctaatactttattgaacgctttccatactcagcattaataacatcacatgctgcggctgggtcatgcacttgtgtgttatattgcttgactctcaggactcccccatgaaagtgttgattattattccacttatgagttacaaagtgggcaaatatttaatgtccaaaaatagacaataagtaattggggcaagatttaaaattcaaaaggtctcattcaaaagcatacatttttgtgttactaggggttgaatggagaaagttttaaattatatcgtagtcaagctctctctcattgagctatagcccaagactaccacacttcttaatatgcactctaaaacgttattacattatgggaaaatacatatacaaaagtcattgtagctctagaagagtcaactgagctttgccacatgttttgaatttataataatgaagctttagtgcttgctcctgtaagatggaaatatttttccatattgttattcttttctttttctttttaaaatattagatccagagaaacaaagatgatattatagatttaaaaaggaatacaactggtcttcctcaaaatatacttagtcaagtccaccaacttaactcgaaggtaaggtcgacatatgcattgcgctcatggtaagagccatgagttcttgtcaatccaactttgtacgtagtgagctcttttgtcgttagctgtttatcgttacattgtgaactttggggtcaagtggcatagctgtaatggaggctagggagtggtagtggcagaaggcagtaagcactacggcaaggctttgttcaagttctgatagcatctcccttgcccaaggcttggctttgttcaagtcttgatagcatcttccttgcgaaccaagggggggttatcactgtctttgtgctgtaatctccttgtgaaggaaacagagagtcagcttatcagtgggctgaacttctttttaaaagacctttaaaaatttacaggtagaaagaaaccccagaagggaagggaataaggagggggaaaataatgaatgaaaaccaaccaagcaaaatgagtccctaaaagagcagcatagcaatgggtaacatcacgtgacagtctctgcgctcggtaattggtgcattttcttccccgctgctacagctcgtggatcttgagagagattttcaaagcttacagcaggtaagttctacggatggatagtcaccgaaaatatgtaagcaacatttctaaggtaaatatggctgttgttcctctgtaaacctagtactcaggagaccgaaccaggagtattgagagtttgaatccagcttaccgtacgtagcaagttacagaccaccttgatatacatagtatgaattaacctaaaataataataataataaatagtagtagtaatataaatgaatcaatagtttcattttaagcggtcaatcaataccaaggacttgattttccattgtttgattcctgctcctgcctccgtccctaggatgtacgagaaaacccagggcagtatgccaccctaaggtcactaagaatgtaggatcttctacacctgagttcacagccctcaagccccaccccttactgtctcctttagccatcctgctgtggctttacttgtgtatgtttggtcagctagtgatcccccagctggcatcaataactgagtctcagaaaaccacatagcctctcctcgctgagctcagaatactggggctgtacagtgttctcggctccttaaaactgcactggctggcagttcagcttaaaacactccccagagcaaatacactctaaccttgctatgtgtaggcaagactgtgttcatttatgcttttcaccttccttgtgggcaaatgactaaaacatcggttgaaaccataacccttctgcccaaagaaatgtatagaatgtaccaatacttatgattctgcaattcccagttaataatatctgctcaaatagttacaactcctttccataacggttgacctcctactgtgggcattaagtttggtgaacaacttcatgttctctgttcatcacttcgagaacacattgtacctcagccttcacatcttcagggaatagctgagcacatgagaacatgtaaagagaactggctgctgtggagcaaagcatcatgggggttttcaaactcctacagtgcttcccagtttcattgctggtcaagaactggagattgcgattaaaatgagcttccgctgtcctctcccctatcgtcggggtcaaggttttaatggtttccaatgtcaatttccttctgctttgtgataggacaaggtcagcagtcactgccaccccctcctcctcttcctcctgactgctaactaattttcgttcctgctagaacccccaaatctatggctttgaactgctttcgttcaccagaaaactcaaaagtttgtggccaatgttcttaataatgtcctttggccctttactggacataactcattgtggttctgacatgaagacaaatcataggagggaagaaagcagaattcacagacacacatgaatgtgtagtcctgggatttataacaaggacagagaaagaatgggctttgcagtaaacagcactggacaagttggagatctcacccttcgtcagctaccggaattttgtccatggaactaagttggttttctctgagcctttgttggtacttatgtatgggtgtaaaaaacactttgtccctgcttgaaacaagatttgactaaggtcaatgcattaaaatgtcttgactgcatcatcacttgccctcggtgaaactgttgcctctgcacccctaaatctttacaaattgtacagaatagtgcccggtagctgacgaagggtgagatccccagtttgtgtggacaaaggtagccctgtttgctgtcctggtctaaaagcagtcaggtgagcagagggcaaaaggtgtatctgctggctccatttcaaacaaaggggcttggagagaaaagagctcagtcatctgagccagtggcaggagggctggtaataaaagatgatccgttttcaaaggcttatctagaggtacctgagataagaccactaggcaagagagtggaaatttccatttcattttcttagtgcaatagcaacattcattcttataccctcatttgaagtcttcttccttccttccttccttccttccttccttccttcctccctccctccccctccttccctctctctctctctttctctctctcttttaagatttatttatttaatgtgactacactgtagctgtccttagacacaccagaagagggcatcagatcccgttaccatgtggttgctgggaattgaacccaggacccctggaagagcagtcagggctagaaatctttattcctgtctagtagcacttgtttctcagatgaaccatgctctaaagtatgtagggtgttaaggaaaatgagcatgattgcaatttttacaagagaattgactagaagggggaagagagtcattggaggaattctggaggaagccctcatagatgaggagaaatccacaggctaactgaagcgctcttcactgtgcactgaggacaagcactattctctcactgacttaactgtcctgtcgtttctttcagaatgtggagagaaaagtttgcagtagcaatccctgccacaatggtggcacctgtgtcaacctgcacgactcctttatttgtatctgcccttcacagtggaaggtgagtcactcaggctttcacttaaaaatcagagaacggctggcagggagccagccatggcttcttcggatgcattcagacacacctattatccaccaaagtttctaggattctgtgcctcacgagtcacagtgacttgtgccaaatagcggcagatttaaaccctgggccatgacagttcgttctgttagcactggcttgagtagttcagcactggaaagcatgggctgagtcttggagtgcatatgtgaatattcttgccctcttctctttcggtagcagtgagaatactgcatgcatggacaccaacaaaatcactcagtaaccacccccaagtatagcagccttttgaaataaggactcgtctatgtaaagattctctcttgtgaccacttgaccaatgtactcccgtgaggagcatctcggtcctggtctgatctgagttctagaagaatcttagcccaagattaatattattaatattgtatttgctttcaccaagggcttattgtccacatataagtcattaaatatattgtatgaatactgttctataaacgcccatgtcctatggtgcctgactgggttctttacatctctgcagggtctcttctgctcagaggatgttaacgagtgtgtactttatgctggaacaccctttggctgccagagtggatccacctgtgtgaacactatggggagtttcaggtaacttctttttaaaatgctgtgtgtatttctggaggacaagtagagcaagtcattaaaagtatccaaatgacggtctataatactaggagactaggcacccacaggggctacctgacttttattgaacatattcatagatattttttgctcaaataaatacaaattttcaccccatgaagaagtcattttagcagcatctctgaggaaggagaaggccatcatgactgtcatagagtggtcagaaaacgtggtgcaattgagttgatgcctgagcaagaatcagattcttaaagagcagctatgggatgaagttgtgtggcacaggcacaggccaccatccctgtgccccagtgctatgctaatttcatatattagcaggcttacagttgcaatatgggcacttcattcacactgtgaaagaatgttgaccaaaacaccaaagattgaaagaacattcagagacccagttaagacactgcattctcaattagccataaggtcccagcagccataatgacccatgcagcttgtccccttacagactcattttgatcaaatgatgcactcatggcatcttccaatcacctcatcccacctatagtctttccgaggaaaccgtcccttaaactgaacaagatcccacaaagcctctgtcttcccactggacttcagcagtgttggccagtaaagccagctaatcaagtcaggaagttaatgcttgatcattggcagatttactagtgtatagtttcttaaaataatttttgagaggaacttgacagcatcttttgctatattttggctacctgcctgtgttccgaggccccataaggattaagaagccagttttgctaccgcacaaactcctcattgctcagcagaataatctaacttgattaaagagcggtttatttgctcccttcctcacgcctctggtgtcttgtagcagtgcccggcagaaatgagtgtaataattttgctttaaccctgtcatctcttaacatactttctcaagaaggaaccatagttcctttgttctgagctttaaaactttgattcactctaggttaataaatatgactcaggcaaacttctactaggcatgttttataaattcaattattgtgcacaaccccaaatgaccgcttctcccttatgtctaatactatgttctctgagaggcctggtcatggggcatagtgattggagtcattagtaaaagccatagctttgaaggacaaccagtgaactttttgagggctttattgttcagactttggatctaattgaaaccgtgcccagtgacattgctgccagtcacattctggctccagctgactttcattcccttgaaagcattatcgcatggtttctgtttatggccatttatcaatcagactgtccaactggagatatcagtgacaagtgtcccaaactgactcctagcacatttgattgcttgcctccccagtatctagtaatgtcctggaggttaaatatcattccaatatttctttatctcaccaccttttggtgcattctatgccagtaaatctgtggtggtgtgggtcaaagaggagccgttcatacaagccattgctatttgttttctagcattatttttcatacttaccctataaaagggaaaaaggggtggggacctgtagcattcacaatttacaactcttcattgcatgtcaaggatgtgagatacacacacaagaaaggagaggaagaaggagagagggagagacagtgttgtttttcagagggaggtagcatacccttacaagacaggactgaactcgctcttgttccctacgcacaggaaagctgaaggatttctgctaactcttggctcctggttgtttctagatgctgccctcatagatttactggggggcatttgaaagcagagcattcaactcttaactcttaatttcttggtatgaaaatggtttatgtagccttgagaatccaagttgagtacatctttttttttttttttttttttttttttttttttggtttttggtttttgagacagggtttctctgtagccctggctgtcctggaactcactttgtagaccaggctggcctccaactcagaaatctgcctgcctctgcctcccaagtgctgggattaaaggtgtgcgtcactatgcccagcaagttgaatacatcttaaatacatgaattgaggtatattccaggaacttgtctctatatgtatgttttcctgtattcgtgcatggatgcacatgtatgtagcagccagggaacaacctcagatgtctctcctcaggtgccatctaccttgggttttgtttgttgtttttgttgttgtaatttttattatttttaaaattttatatgtctgagtgctttgcctgcatgcatatctgtgtaccacatgcatgcctagtgctcacataggacagaagaagtgtttacttcctggagttacagatggttgtgagttgccctgtgagtgctgggaaccacacccaggtaccctggaaaggcagcaagtgcctttaactgcctacacatttctagcccctcagcttgtattttagacagtctcccattggcctggaaagtgccaagtagaccaggctgactggccagccagacccaggggccctcctctccctgacgctccattaccaagattattagcgtaagccacagtgcctagaccttttttccctctctcctttttcaatgggttctgggcattgagctcttgtcttcacacttacaagacaagcaattcactggctaagccattatccaccctcaacatctcgaagggatgaaataaaatatatactgctcatgagcataaaatttagtttttgctttgtgagtctgtatgtaataaaacactgagcatttaaaccattcctggaattctgttaagtctgggaagttaaaatgcttaattacctgtagtttcactgggctcagaagctcctttgtgaaactgaaccatgaatttgataaggaaaccatgagctgctgttgaatgatcttagttagcaatgtgggtatggcaggcaattagaaaattctgtgagtcagcttagttgggggaaatggaattctttcttcacaagtttaacaattcatcattatgaatgtctttgagaagatgaggcatcatgtaagtactagtagttgggatccctgttttattggcaatttcttttcttttggtcccccaccccactttggaaaagtttcttctttagagtgatgggtataggacaggataaactttcacctgtttcaactaattcctgaggttttgcctccagctgccatgagagccaagagaaaggcagttttctcttctcggtattattgtctcctaatcattgtgaacgttgcttctgattgtctcctgacttgctttgtatgtaagctagctcttagggtctggctttgccacccctgggtggtacatgtacttacagtgagaacctacaaggctttctaggaagaaaacaagctgtgtttactcccaggcacacagtgctgacgtggtacatcttatgctatctccatatcattggtggaatttaaagcattgcaaagttgaagtagtgaagataattctgttaggcatttgtgctagttaggtattacattttattaattcttttcagttatccaatgtactgatattgagccatggactctaagacaaattaactaggactatggaaggatatttcagtgtcttctcaattggcaagtgcagtttctgaagaccgaaagcctagtttcattctactaggataaaaccaacaataaaaaggtgactttttgtttgtttgtttgttttaaaaaaacaaaaactagtaaccaagagcttgagagatggatcagcaggtgaatacacttgttgcaaaagctcagtgacctaataggatccctggatcctatggtaggagagagccgactcctgacttaacacacacactgtggtatgaacatagccacacaccaacctacacatcatgcatacacatacacacataataaataaaatttaaaaggaattactatcaaaggcaggaatactactaaggtagtttaaaaaacatatgccttttattattgcttcataaatatttattcctttaaaagccatactgagtcactttgaaaacatatttcacatacaaatgctattatattataaagtccatggaaaattttcatactcactttactcttgagaacagaaatgtaacacagaaaaataacggagctgagtaaagcagacctgggtttctcttcatcttctctcatacattggttctgtggctgtaggcaatcttatttgctgcattcctgtaaaataagatgaaaacatttgcttttgaagatcatagcaagaaaggctatagtttacttgtttgttttcttttctcctcctccttctcttccccctcctcctcactcctcttcctcctcctccatttctccttctccttctcgttgctgttgttgttgttgttgttgttgttgttgttgttgttcttcttcttcttcttcttcttcttcttcttcttcttcttcttcttcttcttcttcttcttcttctccttctccttctccttctccttctccttctccttctccttctccttctccttctccttctcctcttcctcctcctcttcctcctcctcctcctcctcctcctcctccccctcctcctcctccttcttcttgttgttcttttcctccttcttctgattctggctcttcttgtttttcttcctcctcctcctcctcttcctcttcttcctcctcttcttcttccttttctccttcctttaatatttaaattaagtgaaagaagtctactttgcatattgtttgaaagactataagatttatgtccactcagctccaagtgacaatggctaggaagaagtaagtgagagctaaggagagagggttgccctcagacacttgagcccaatctactctgacatcataagtagttttccagtggttaggtatttagctattagagaaacatacttctgagtacttcctcaagagaaagacctttggatgaggcatcatgagtcagtaccttgtcagaggtgaatgtttagtgcatctgttccggatttacactttcatcactttgtcccagcggttcccaaataccctaatagtccttgcatggaaaatgcatttagaaaaacttgtaataattggttctgagttgttttgttttacatgtcaaacttacagagtaaatatttagcaatgaatcaaatgcttaaatatgtataagaaatgcttaaaaatatgataatcccaaagagtataatttgcttccctggaagaatgagttagtgaagaggagagataacagggcataagggaaagcatggaaaaagatgagtagctattagatagggagcgaacatcaaatctaagtctaattactaattattattaattcatgacctggttttaatgagtaaagaaatcttggaatgctcatagacattatttattaattaaataacttttctataattacatagtagtgctataaattacatgcaacatacttacatatttttaaagtattcatttacctgagatagaaatttaactgtgtcccctgtattctaagttggtaagtctggcagctctaaatggtagtgcatagattgtggttttccatatctgtcctctccatttctggcaatacacattgaactctttttacttggaagtgactctgggtatcaccccagcaattgtttctcaatccagccctgacatgccttgattgtttcaaactcacttcttgcactatcacactttgacatctgtgattattagctgagctcctggtactgaatgcatagtgctacaacaacctttctgctttgtagcgagtcttcctttccaggagcctcaggaagtagctcaaggtccctgacatgagagacaaacatgttctccagatcctccctcgtcctcctctggcattagcactgacattcagttccctttgggatgaatctctgctggggtctaaccatgacctctgtgcttggcttttccactccctaggatgtgctcacacttagtctttgtgagtccttcacccccaccacatctctcaaccttacaagatccctttcctatgctttgcagaaatacagctaagccagcaacttaaaaagtcacaactaaacaaacttcccctatttgatttctgtttacctcacatttctagtggtagtgcatctcttagtatttaggaaccgtatgatgattatattttgttatgcattaaagtatgactgtgaaggaaatgtccccactattgacaacatctcttcctgaaagaatacatatttcctctgtaatagaaaggcccctggcagagaccatcacctgcgcttcttgacaggtgctataggatgaatgcagtgaacttgctgatctcccgtttcccttcttgaatgaactccattacccatgatttacagacacctgacttttgacagtactgtttgatgactgagatcaaaagaatttattgccccagtcctataaaacattgaatcatgattctctgacaattgatttgcaaagataacacaatcactcggtgcactgctcggaggagaactgaggaatttcgttctaaggttgcagctgaccaaactgcttggctggtttattattaacgttattggtttgcactgatggataccttttatggatgccaatggacagagtctggtactaaaactgcaaaccctgagcttgtgctcttgtgtaaccaacagatgtgactgcacgcctgatacgtatggacctcagtgtgcatccaaatataatgactgtgaacagggctctcagcagctctgtaagcatggcatctgcgaggatttacagcgagtttatcatggacaggtgggtcccttcccctcagtgcttcttgtggaaaccagtgttacatgctccccatgctgatgctgactctagaccatcactgtgctgctacaagtgactgtagaggtgaagtcccctccatttcttggtaggacacacacaagcaaatggggagataatttatacagaaaactggattcagaaaactgtgaggcttggcctcctggcctgtatgtttaacaatgacaagacacggaaacattacaggctctgttttgtcaatagcatctcatgtctggatttttcgggccttgagtccctgtgaagggcacactttgtggatctagctctccagtcttcctctcagctctgggtcctagatgggtagggtagtctggctagtttgatgttacaagaattttagttattctgaattaatttttaaagattcttaagagatagaaaacagtcccttctagcagtaggagtgagaggaaggagtggagagaagagatttttaagaaggaaatgattgcccgaagtctgtacctagttgggtgtttaccctttaactacatagctggctgagtccattgactgtaattacagctcttgattactgttactctttcctgggcatctttgggataaattataggatccttttatcctgaaataaagatgttcctttcccatggtctagtctaaatgtttaaatcatatgggaagagaaagagaatccactcaactgacctgatgcaaatgaacgtttgaatgacagtaaagagttcagggtttggtgagatattcagacctttttctctcctcttccccatagcctttattcactttattgttttcctttcagctgagatttaactgtatctgtgatgctgggtggacaacactgccaaatggtatctcctgcacagaggacaaagatgaatgcagcctccagccttcaccttgttcagaacatgcacagtgtttcaatacacaaggttccttctactgtggcgcctgcccaaaaggtactttcttgggggacacatgctaggctttgaataccacacagacaaggtaccagaatcaacttccctctaccactgatcatttttccagaggtgcctaaacctacctgcatgtcctactcaagagcatcttaatgctagaacaggtctccagagttggagatttgctaggcagtgtgccagcatccaactttaggccataattagacgtgggaagagagttattttcattgtaaataggagaagttgaggcttagaaagactaaataacttctccatgtacacaaagcttattcgaggccagatataaatccacatctgcctggccctggatctgaggtgagctgcagagtacgccatgactctgtcaaccaaggcacatgtgcacctagagctgcatttagagacttgtagtttaacgggtgcttgcatggtgttggtttagaactagcaaaggtaaggagaagaaagtcctctcctcttgcatctcaggggcaaaagtcacacgtagctgaattctcaaacgtaatttatgatgccaatccttaaacagtagatatcagataaaacaaatggcttaaattaaagggtgggtagtgtgtgcttgctttttcattttcttatttgaagaaaacaaagagaaacaaaacttaagaattgaaagcaaaaattttcatttttgtctttaatcattctattttttttcctgaatcttaaaggcactatatgtttgttataaatgttaggtaggtattacaagcatatctgtacaaaagcagagcatagtactatgtcttcttactgtgagaaccatcattagggctagagtgcatgtctctcagctccttgtgtatgcaacctaaccatgctcagacatgatcatttccttaagtcagtttatgaaggataccccacttagtcctaacattataagtatgctaaagggtgaagatatgtaaacatgattattattattataatgaatcccgagagtaatactaacattataactggctacaatagaatatttaaaggtttcttttcacctttaatctcatccttcacttttctttacttttaccaatataggcacagttttcagcaagtcattcctgcagattactagtatgactccaactcttcataatgttctataatttgttgtatacacttaaactatgcatgagaaaattctctcaatgtttgtattgtgcaaatgtacgaatgtgcatatgtatgggcatttctaaaattacttttaaaattcagtgccatagatgagtcttgaggcgctcaactgtttttattgtccttataagcaatgcctcggtaggtcttctaatgtattttgtaatatgtggatggttttatctacaaagaacacatttcaagaagtaaaattacttaaaaaggaatttatttttaaaaattaatgaatgttgccagatctcattccaaactggttttaattaacatccaatcaacagtctgcaagtgagccccatttatctaacacttcatcagaattagattctatgtatttaaagtaaattttggactaccagttagagatatctcattttaatctatagttttgtgtattttattcatcagtttgaattattctttaaatttttattttatttatttatttgggttggggagtgcatgccatagcatgcctttagaggtcagaggacaaattggagttagctctctcctaccatgtgagtcccaagcattgaacgtagatgatcatacttagtggaaagcatcattacccactgagccatgttgtcaacccagaatgattttgtgtatgtcttaactacctgtagttcttccttgttaagttgttaagtgctaatcttttaatcaatattttttctaggttggcaaggaaatggttaccaatgccaggatatcaacgaatgtgagatcaacaatggtggctgttcccaggctccactggtcccctgcctgaacactccaggatcattcacctgtgggaactgtccagcaggtactacatcaggcttcctgatgccatcacaaggcaatgcccttgaaatagaatctgtgctcactttaaatattttttccatttttattagatattttctttatttacatttcaaattttatctccttttctcatttcccctccgaaaactccccaacccccctacccctgctcactaacccacctactcccacttccctgtcctggcatttccctacactggggcatcaaggcttcacaaggccaaggtcctctcctcccattgatgttccataaggccatcctctgctacatactcagctgaagccatgagtccctccttgtgtagtctttggttagttgtttagttcctgggagctctgggggtactggttggttcatattgttgtttctctttggctctgcgaaccccttgggtcctttctttagttcctccattggggaccttgtgctcaggctaatggatgactgtgagcctccacttctgtatttgccaggcactggcagagcctctcaggagacagctatatcaggcctctgtcagcaaacatttgttggcatccacaatagtgtctgggtttggtaactgtatatgggatggatccccaggtgggacagtcactggatggcctttccttcagtttctgctccaaactttgtctgtgtatatcctcctatggttattttgatcccccttctaagaaggaccaaaatatccacactgtgtcttccttcttcttgagccttcatgtggtctatgaattgtatcttgggtattctgagcttctgggctaatatccacttatcagtgagtgcatagctgtgtgttcttttgtgattgggttatctcactcagatccaacatgtaataaggacatatgctccattatgttcatagcagccttatttataatagccagaagctggaaagaacccagatgttcttcaatagaggaatggatacagaaaatgtggtacatttacacagtgaagtactactcagctattaaaaattatgaattcatgaaggtcttaggcaaatggatggaactagaaaataccatcctgagtgaggtaacccaatcacaaaatgatttctaaggaaaaaaaaaaaaggaatggtgtaggatgcctaacttacagtgtagattcatcaatgcaataggacggcaaagtaagaaagagacagaaaacagtatcagcagcaaacagcacgaaaacacagacctgggaaatgcttctgtgagaatctttagatccatcactcttttgtgctcatacatgtatattcatttaatatattcacttgtggaccatgtccacagataaggcttacaaacatgatacatgttagtttctttttttcttctggaaagaggtcattctggttgtcctctagttcaaataaaactagtcttcaagaacttcagagagttctaagcaataaatgaatatatatatatttatgtatgcatatatgtatatatacatacatacatacatacacacacatacatatataaaaccaaagggggggtcaatatttttttttttgagacagggtttctctgtgtagccctggctgtcctggaactcactctgtagaccaggctggccttgaactcagaaatcctcctgcctctgcctcccgagtgctgggattaaaggtgtgcaccaccacagcccgactcaggtcaataatttttatacagtatattccaataatgttttctcctccctcaagtcctctgagttattttaataacatgaaaaatggtactttagacatctgtaataaatcacccccaagaacattagtcaatgaaattaaggtgtgtcaatttagagcctgccatttctatgacacctcacacttgcaagcttagaatatgtacacgcacatacatatgtgcacacacacacacatcttcacacatatatgtatgcacacacaaagccaccgtgctgttttatgagttcttttaaccatgtcctgctgattgactctgtggagtttcatatctctatctacttggctcttcagacttggttgcctggtatcttagtcggggtttctattcctgcacaaacatcatgactaagaagcagttggggaggaaagagtttattcagcttacatttctacactgctgttcatcatcaaaggaagtaggactggaattcaagcaggtcaggaagtaggagctgatgcagaggccatggagggatgttacttactggtttgcttccactggcttgctcagcttgctctcttatagaactcaagactaccatcccagggatggcaccatccacaaggggcctttcccccttgatcactaattgagaaaatgccttacagcaggatctcatggaggcatttccccaactgaagctcctttctctgtgataactccagcctgtgtcaagttgacacacaaaatcagccagtacacctggattctaatcttagacagccattgtctttttcccgtattcttgaccttgtttctcaccctctgctgtgctttggttaggtttcagtggtgatgggagagtgtgcacccccttggacatctgctcgatccataatggaggctgccatccagatgcaacctgttcctcctcttctgttctaggtaatggctcaccccccattgatccttggaggtttcattcaaaccctcttttctgtacaatttcatattctaaaaaaggaattattctggaaatttcaggggggggggagtgttgcacagtctcactctgtagccttgaaatcatataagcctcctgcctcagactcccaagtactcgtgttataggcaggagctaccattcataactctcaaaatcgttatcttgatcctcaaaaaaccctaactgatccccaaaacctacatatatttaaattctataatgtagttactcttgaacgatcttctttgactaaaagttgtttccaataataattaagccaaatagtcaataatgactttagcaaacagaatggagaaagggaagaaggacatatcaccttcttttataattcttctttctgtgccattgactagagttgtgcctttggctactgctggcagcagagaacatatagcatttatttcaggcatcacagttccagccggaaaaaaaaaaagtttacttctaggaaaggacaaatgaatgcagggtggtctcactgtgtagttgctgtggtaccacataaacaagctccaggtcatgtgtgcagtaacacatctttccgagcattgtctcattgcaagtcccagtcaacagctcgtgcaatgtttatgtgccccagctctgacaatcacagctactatttttttttgtcttgattggttttatagctaacagttagcttcttagtccttttaaagcctgtgtttttgttgctattgaacaataatgttttcagttgtacttctcagctttctgtttctcatatgcactgctcatttgctttcttttgagtttgtcacctttgattttacagaggaaaccgtcttccccttctgttttgtgtttttgcaacactttgttcgcagcatgtcattctctggattttgtactagtattttctatttagaggtgagagaccaaaatcttttaaattcaaactcagttttagagaacctgacctaagtttgaactcaggtaaattaacaggctggtacgtagcattaatttccaagttatcccccccaacaaaaccagagcctagctccagtctctaggctaaccctcaataggaccagcatctccagattattctctcaacaaacctgtaccccactcccaggttacaagaccaccccctgcctaatgatcaccattgcagagagaagcagaatttaagtttatgatatgactcccagcaccagccaattatgttaaaggcaatagtaacttcccagttagatgcttgtactctcaaccctgattgatgcctactataaaaccttgccctgacagacatttgcccccccccccccccaccaaaaccattcacttgatggtggtgcattggggttaggtcaagctagcttgaatagaataaagaccctgctgtgagttgcatcagatgggctcctgtctgttttttttaaggggtggggatcatcacattggtcatttgtgtaacaaaaagaaacctagatgatttccatccaaatggttagactcaacctcatccattaaataatacaacacattccttgatgtttcaaatttttatttttattaatgcatccttaatgtgcatgcattgatgagaatatattcatgtgcacaggtgtatacttacatggttgtatagatcgcacacatatgagtgaccaaacgatcaggaagtgtttaacagagcagtgatgtggacaagagcagcattcctcagattcctcaaatcccatttgatttctcctttggtctcatcatatgcttcctatctgatgatggtcaagacatccccatgcctctacactccacctctcccttgtgaactctgggcagtagtagcttgagtaatagtcagcttgagagaccaaaatgaaacagacagatatgaacatagctacattttatgcacaggaactggtcgtatattacatggtgtgaagtagcatttcatgttctttaacgatcatcatggcaacccgtgactttgcctgaggaatggcagcagatatccaggcaaagcatagccggtctgagtctccttacaccatttcccttcagtaaatactttaaaagaaatagataaaagaatgcaatcttatgcactcctttatggagaaaagattcctgtatgtcttactttcaaatcttgcaagcactatggccttaaggacataaaaccaccactatccatttatgctacaagtttgtcgttaaataatttattccaattgaatacttcagtgagattttcaatgcattttcatcaatatttgctggtggaggaacgtgtttacattcatcatcatattaattttcatgcattattccagctcttttatagtgataacagcaatgtatttctgcagtgacatggtgaccttcagcaactagggaatctgaaaatctctggatgttgtatttagtggaaattcataaaatattaaaggaggtatttgttctaggcattacaggataaaactgaaaatcctggatgttttagtattatttttagcttctaactcactcgtaattattaatggtactagaagattcaatcatttttgaaaattgaccaacttctttttccaaccccttatttggtctttccttgtattttgtaacatggaagcttagaataaaacattaaagaagcattggtgtttctattttgtttattgtgttactgtgttattttaatctgtagtttcatcacaaaattccttcgaatgcctcaaattcattttttttcagtggaattggacataggtgaaatctgtatgtacccgtgtctggaacatgagacctgcccatttagtgctaatccttgctatcactggtaccacgccttaaagtttctcttgaattttcacattctaactgtgtctccttgggcaggacaatctttgtgtgcttgatttttatctgtaaaggtgtaaatatttatagcagaatccatttatagaattatcaggaggattgagcaatctacctctgtatgtgtagacacaggtctataatgcttgcaacatctgtttatagggttatagataggattgagcaatctctgtatgtgtagacagagatataattgcttgaaacagataccgctgccataaaacttttattctgtactaaagatcccttcctgacgaagaagtgccatttcccatttcatagttccttcttatttgtacataaccttagatcatctgttacatgagaccatgattgcaaacttatataagaaatcagaaccatctaatgctttgttttacaataaaatgggaaagacagagattttaatcatttctcctcttgctttgtcttgactgcccataggagaaaatgcacttgaagttggtggattcttatctggacactagaattgaatttcatgactgcctctgaaccaagaatacctacacttacacatccatttttatttctgaacagggtccttgttgcctgtctgcacctgtcctccgggatatacaggaaatggttacgggtctaatggatgtgtacgcctcagtaatatgtgctcaagacacccgtgtgtaaatggacagtgcattgtgagtcttgctcctcttagggagattaaaaacttgcaaagaaccaatcatagattcaccattttatttcatatgattcttaagttaggtttctttctttctttttttcttttttctttttgcttgttttgttttgtttgggggaggtcctctcctctgctctcccctcctctcccctcccctccccaccccctctctctgaccaggttggcctcaaactcaaagattcacatacccctgccccctgagctctgggattaaaggcatgtatcaccagcacccagccacaagtttaatgataatgattcaagctttatgctaaggtttctgattctcagattagagattggtagtaactttggttcccaggaaaaccaataagccaatcaattgattttttaaaagatttatttataggtttgtatgtatatgtccttgcacagacttgtgtgcaccatctgtatggagatttctgctgagttaagagagtgttgagtatcatacaactagaattataggcagttgcaaactgtcagatatgggtgctggcttctgcatcctggtcctctaaaatgcagcaagcccttcaaaatctgagctctatctttgctccccatttagttgttttgtttgtttaatcaatgattttcaaactagtaagcaaaacctatagttttatggaaataaacatgactatttatactcagtaattgatgattttgtcaattggaaaacacacagtatagttcaattcctgttaaatatataccttacgttgtcacttcttttcatgatttgggttgattctcttatattttctgtccacttgatttgtagtatggcattttcttttcatcttaggaaacagtatcaagttacttctgtaagtgtgactcaggctggtttggacagaactgtacagaaaacattaatgagtgtgtgagcaacccctgtttgaatggagggacctgtattgatggtgtcaacggcttcacctgcgactgcacgagctcctggactggttattactgtcagactccccaggcaggtatggaagacattccttggaccacagatgctcccagcttaggggtatcatcgtccaatagactttttgcgtgtttgacaatgtaatctgatttcttcaccagtttacacactgacaagtagatttctccttgcagaaatagcatagaatccacgaagtggtatttgtaaacctcattttcaacaggaaacatttttcttcaaaaatattgtaaatattttccatgttctgtatattctttcataatgtaccatatactgaggaatttgcctttcagttttcttggagggctgctttcttcatggcaggcatctagtgatcataggaccctaactcatcattctcccacttactgatactttgcctggttaatcgaggtatagactgtcatttattgtcaatgaacagccttcattctatccatatcactatgtatttctctagttccatagcgatattcacacttcagccaggttaaattcctttctcatttgccatccagatgtatctgttccttgggcaccacactcaactcttcatccaagtctactctaccagctgcaagctctctgttcttactcctgttttcagatcagtgcattgattgaggtcttaccacacgcttaggacaatgatagaatataaaagcagaaaacactgcctctacttatctactccccatgtagtctaggaactgagactaccttgaggcagcagaaggtggcattaaatgtcaaaactgatgctgtaattgactcatgtggcgtaaagcctggtctatcatggcagtggccaaggaggatgaagaaatcgattgaagtttggagaaaatgtgttgggagtgaaaatggactgtggatgcagaaaggagggaggaggcttgatgtcagcacaaagggaccagaaaggaggaaagtgtgggctggaggagcctgctctcttcctttcaataatctatgaaaaccacaattcatcttttttatttttgcagcttgtggagggatcctctcagggacacaaggaacctttgcctaccagagcccgaatgatacctatgtccacaatgtgaactgtttctgggttgtcagaaccgatgaggaaaaggtagacatagtaactcttgtctatgagcagatctcactcgtgcattcaaaactgtgatacatatgacatgtatgtgcatgcgtatacactcagagaaagtacgtatgagagttccactgtcatatattgggcactttctatgtgcagggctttgggctatatactttgtttatctttctctaacgccatacaaactctttgaaataaacaacaatttattttacagttgagataacagaaagtaagagaagggttggagttttatcttctaatactacctagcttataaaaggaacagatgaattttcaaatcaagtttggttctagagtctctccctccaccccccccccactctttcccaccctttgcctagccatcctagccatctcttattgcagttaatgaaggattcccaacattggttgtctagctctaggcccgtagcaaatctgttaaactgtgctgttactgcagatgctgcaaatgtaggatttgaagatgatcattgaccctagtgggttgtcattaagtgggggcaactgatattaagatggcttcctatgtagtatccactctgtgccaggtaccatatgcctcatatacttcagtatactttaaactcaagttaaaaattattttttaatgtgtgtgtaaatggagcctaaattgtttgaaacatttgtccagatatgcgtgctttttaaatggcacgtggttttcaagacaactgactccaaagttcatgactctgagtcactacatgaacaactaaaactaacatctgagcccatgattttttttcatcgttcctgaacttttagatttctaaagtacttgttttccaagcaattctcagacttaaagtggtaggccttaatagttaaaatttcaatgggaaaatagttaaaattttttcccttgaaatcttaacttttcccagcaaactaatgttatagaggacattgtgcaagagtcctctataataataaaaaatattatttcccgtaaagaaggacaaccagttgtagcttggtcattacataatttattctattgtgaataaattccaaaaaagtttcccactgggtctgttgtgtgaatttccttccttccatttagttctagtgaattctatttcctgacattgaaaatttatttttccaaggaaaagatgctgtgaaaaatctttatatgtttattaccattttaaagaaaattcatccttttttttttttttggtgatacaattttacatagtctttttgccataagatataatagaaaacataaacaactaattaacatttatttgatttccatttacaattcttcaagtagaaaataattaaattttttccactaagataaatagcatttccaaaagtcgccagagactttttctgatttctctatgaattatagtttggactgaatgattttaaagtagaattactgtccacgttggcgagcaactacagagtggtggctgtcactctttgtgtgaggacttgtcaactaagcttccgcattaacatgggagtgctttcatgttcttccaggttctgcatattaccttcacgttttttgatttagaatcggccagcaattgtccccgggagtaccttcagattcatgatggagactcctctgcagatttcccacttggtagatactgtggctccacgcccccccagggggtccacagcagtgccaactctctctatttccatctctactcagaatacataaaacgggggagaggctttaccgcacggtgggaagcgaagctaccaggtaagtaggaaatgaagagcaagcagaacgttcatgatgttagggcatgtgtggagactacaaacaatgcaacattttaaatagtcattgtaagaacaaataatttaaaaatgagtttgatttttgaattcaaggacagaaaaactagggtgcattgcaaagctagaatgcatgagtagtaatggggcccttataaaattactggatagaattggtggattgttttaacacactacttgtattgattgtttcagagcttaatacaatttattttgatttcatttactccctctcttccccctaattcctcccagatccatgcttatctcagtcaacttcatgttgtattttttctcttctggttttgaatacttcaccaagttcaatttgtgctttccacattcctagaggttcaaggacctgtacacaagcttggccagagggacaagctgcctgtgtgcccagtgcttcgcaggcggggaaagcagctcctcagagcgagctagcctaagaaaagccaccaactccaggttcaagtgagaggcctcacctccatctgtaagatggtgtgagactgagaaaggcagctgaagccatcccgcagcctctgcatacacatacactcatgcacgtgacatacacacatgcaacaaaaacaccttttaatgtatgcactgaagtgaagcgttttactctattttattttcatccataggttcaaatgtgtgtttttactagtattcagtttgatatactttcccatctgtatttatgtttctcatgtagtgagaaaaaccatgtattttgtaataattggacatggctgtctatatatgacaatttagtcaatttggttagtagtgctgtgcaaatatgttatttctccagagacttaagacgatgttctccactgatgagaggatggcactgaggtagcaagctatgagtatagactttattaattttgttcagacaactttgcttaatatattttatttaattttcctttcctaattatttcgaatatttattgtcccttttcgttcagtgtatagtgaggatgcataagatctactctcttaatttaagtgagatcagttattggttggttactcctacatgcttggtgccaccattgtcctagcaggcaggacagcactgtaggtcaaagcatttgtggccaggctgacatttacatttctcttttggtagtgtgtacaatgccttcctgtactaaagacacctgaacataggggtatgggctctatgtaggcaccagctcaacttcttccagttcaatttgttgtgtaggtgttgtctctaacaatggggtcttgtttgggagtgtttgggcctcccatgggacctttgaccttcaactcacttagatgtaacccaatcctgcttctacaagcttcattgggtgacaaaaaagatgctcagctgggactgtcttcattccattacttgatttcatttagatctccttcatgtgtgtgtgtgtgtgtgtgtgtgtgtgtgtgtgtgtgtgtgtgtgtgtgtgtgtttaggaagcttctaatgtactaggcgtctatactacccctcaaaaaagcacttaattttagctatctcttcttgcattccctccccatccacctctcatttgctactcctgttccagcctctgcccctcccatcaaccatctagaactgtctactctatttcccttttgtaaggagatgtacctgtccctagtcccttactctattcctaacctctgtgtttctatgaattgtaacttatcattgatataacagctaatatcatatctatcacggattttatttttctattgaaaacatagagtcaatttttttgtcaaatttcccctctaagtctcactaccgttactatggagtctttgttcggaagccccagtatcagagtatttctggctgtgctcagagtgacttgtttattattgtctactttttccaacttggccttaataactgtatcatgaacagagcatcacagataaggtgttataaggtctctgggttgtattctcaaaacagctttgtagtaacagggagttccgttactgatggattgcttggatccaactgatgctggaattgagaagggtgtgtcaaagttccatgattcctaagaatatggttcttaccgttctagcacaggctttctgaaccttcagtttttttcagaattatcacaaaactcttacccttctcactgggtctatgataacagcaaggttattcattctcttcagccttggcattccctggctccatacctcgtggtggtctctgttaggcattctgtagtcttcctctatgtatcaacagttaaaggttcctctaaatacctgggatcctcctacaaaaatatttggtgctgtctccatgcaactgcttgcttacatagtatgttgctctgcaattttgaatacttgagaagcttcaaattctggggttttgttgacttaagctagcagaagtgttactgtctcctttgtttattttcgtaccatgtgaagttacacatgggaagatttccagaataagcccagggttcagctcataacctttccattgctcaaagagcacagttcagtgttatttgctccttaagacccctcaaagtaacaataagcaatttttctaacgccaagaactaagcattgttgacatttatttgttaaagaaactagttatgtgttctacacatcatccacccttctggattgtgctgtttgcatctcatgtgccctttatcatgttgtaaactggtacttggatcaaaaggtctattaagttatttttttttcttgcttgccaaggtatccactttgggtagcacatcatatcttctttttatctattaatacttctggattgatcagattggtgatcttctcattccaaagcatcccttttgtgctctctgcagtggctttttgtttttagcagctcttagattcataggaacccacaaattaatgagagtataagtgtatcatttactatctatctatctatctatctatctatctatctatctatctatctatcatctatctatcatttgtctgtctatcatctcaggtaatcaaaaggcttataaattcactacatcaggtatttgcttacaggtaggtcctagaggatgtgtcaatttgatgcaaacttgaatcacctggaaaaggaccctcagttgaggaactgcccctttcagagtagcctctatacctacaggctacttatgcttaaatggggcattttcttaattggtaattgaggaagaagggagggcctctcctactgtgggtggtaccactcctaggcagatcatcctatttgtgtaaaacaatctggccgagcaaatcatggagagcaagccagaaagcaacactcctcctgggtctctgatgtttcatttcctgccttcaggttcctgctttgagttcctcccttggtttcttttatgatgactgtcacctgtcacctgtaagccaaataaatccaatctgtcccttggttgttcttgctcagtttttatgagaggaacaggaagcagactaggagagaggaaatgcatgatacatttttaatttgttcccttttctgttggtatttgagttaatgacttgtttccctgggattcttcaaaatgattaatttcattttggtttgtttttcataaattagtatacttgataagagctgatatagattctttaaaaatgttcttttttcgtgttttttttttttttttcctacttagtttctgagtctgtttgcgcagactccagtgacttctgaatgttgatttgctttctggtttgaaaggatgttccaggcccttccacagtttgatggcttcagcagtgcaaaatgctgcttccggagagagctgtcatgtcctatgagaaacggattttaactcctacatctgggtgctacaactgatttctattgctgggtctctgaacagaagtagaaaacatctttttaatattattattaagggagcttaataatgttattattaagaagttaaggtttagttttccttgacatttatggctcttttctcctgaacaaaaaccatgattcccattagtgtacaacattagtgtatcacttcaggatttgatcctacaaattttcctaagatcaatggcaatattatcactaataacataattgaaaactacttaatgttttgttgctggtgttatatactttatgtacattttgcatgggacacattggtacacgtctatagtcccagcactcaggaagtgggggacaagaagattacaagtctcaaatctgtatgatatgcataacatggccccatctaattagtaatagaaaaaaaccaaaggcatattgttttgagcaggatcacagggttttaaagtcacatgttttcagtattcacgtttaacttttcaattcagtgaaattatttcctcttatttgtgattttagagattacctcttaaattggttaatacatgtaattttataattgtataagaagtatgcacagtgctaaagccctcttaagaacattatgcatttttaaaatgtctagtttccatttctgactctgctatcttgctatttgctataagtagatggtttgtaaaattagctttacacttataccgccaataatcatataggctaatattttcccttctcagataagaagcagtattccctatgtggaggggtttacttgtcctccctgggcctggggactgcatcaaagcttgaatggagcacagcattacatagatgtgtcctggcctgttaagccatatattgatggcctcgtgacctgtttcctctaccattttggaattctaaattttatggcaacaaatactttgcatgttagccttattccaactttcccactgggcctttggaattgtttggtcaacagcatgcataagatttggtattttatgtgttatatttcttctgcagtgttcagaacaccctgtgtttttataacagtgtgggacagtgactacttcacagccagcctaatagtttgtttttaacattctggactcttgacttcgagagtcaagaaaccttacctcagtggtagcagagatgctggacatctttctatgtgtgcaaaagatgctgggatcttttcagtgtactctctcttcatactactcttctttttttaaattttctatattatggatgataacttagatattacacttccatttgatctttaaaattttacattgattatattattttataaatttaaaagttttatactgataatagacttctaagttaagttttaaaaatgcacttctctctgatcttggatgttccctgctaggttcaatgaaaaccatgaaactgattattttgggttttcctttggtaacaaaaactttggcttagtgtgtgtggttttatgaatatcaaccatatttaaaatgacatcttagttttatttctttcttaaggtatatttaacaaagtcttgattagttggtgtttctgctctttgattctactgtaacctttcttacaaatgaccaaaaattctccactaaataaatgtgaatattaaagggaaacagttcttatagacgtttctagtcactgttcagccacatagggagttgtatagtgcgctgggattggcatctggaagcactggggcccggttcactgctgtacttgcttcattcctggtacagtggcttaattgccatgtacatttacttataaacaagaacaacatatttatttcatagttttgttttgttttggttttggatttttcgagacaaggtttctctgtatagccctggctgtcttggaactcactttgtagaccaggctggcctcgaactcagaaatctgcctgcctctgcctcccggcttattttatagtttttatgttataaaatttacatatgatttatataagactattttgtaattatataatttgtatgtttaataatttattacagcataagaaaaactttcttaaaagaaatttatagctgtgcctggtgatggcgcacacctttgatcccagcacttgggaggcagagtcaggagaatttctgagtttgaggccagcctggtttacagagtgagttccatgacagccagggctacacagagaaaccctgtctcaaaccaaaaaaagaaaaaaaagaaatgtatatgtgatccttaactattttaaagtataaagtgttctggtttattgaaagatgtaggggctcacagaagttccagggtttgtttgtttgtttgtttgtttgtttgtttaatttttaaagttgctatataaaaactaatcttttaagggtaagggactgaatctgttctcccattatttatgtcccagaagggtcagctctgtgtcttaaatcacataactgtatgatgctctgaggcatagagttcctacatgggggatttgcttacataccagttggtactaactttatagacatgaaacggggcagcttgaagtactgggtaatttatgagatcctaaagtttgcatagtcatgttaatgaagcttgccttctgacctcagagtctgtgagaatcatgtgactttagcctacatatgaatttagtaattttgtctcttctttcagagtgtggcggcatactgactggtaattatggttctattacatctccggggtaccctggaaactaccccccaggaagagattgtgtctggaaccttctagtcagtcctggctccttgataacatttacctttggcaccttgagcctggagagccacaatgactgcagtaaagactatttggaggtaaaaacaaataaacaaacaacaaaaagaacaactgaaaacccccacgtttcgataggatttgatagagtgtaattagtactcaagacactgtggttaatgacgctcatggatggccctcctgtgttaccaatgcttaggcagctgatgttaaatctctactctactgagtgtggaagagcttgccttgcatccccctgtctcttactggaaattcagactcctggagtaataataaaacctagcaatgcttgtctttttcaatacatattttgatttttagttttccaagacaagccctcaagatatcacaccacttgactctagggggccataatggttctctaggaagtggttgtcagtgttgaatcttcctagaaaatgttgacaattacccttgggaggaggggagtcagtctcctctattccattagcaaaaggttaagatatggaagaggaaaggggccattacattcacatctcatgcacaaatagatacatcaaaaatgtggttctccatttgtagactggaaaggtcaccaaggagattatttcttaggtagttcctacacttttgccactgtaaatctcagtaccccacaacactgtcaaagagacaatgagcttttctgagtccattagagaaggatgaagtgctgtggaattattcataaaggatgaaggatgcagctgtcatgcaggtctccgaagttgaagtcattagtcattagcagcggtaataatgaatttgaaacctttgggaatgattcaaatatcagtttctccttggaaagtcttagcaaaatatccttttaaaagttgacagtaaaaagtgagttattgtgaaattaatattcaataaagcctatcaaattaagattaaagcctttaattcttacatattaatttctgaatagcatattatagaaagtatcaatcacctggacaatattgaactccctctcatttctcatcagtgtatcaaggaactagttacaagtaaaaaataaagtaacactgccttataaatttgctgccaatggaaaaattgatttgagtaaaagaaattgaccataggaggatattctctggtttattcactccttggtgctctatggagtatagatttttacaattgtgtcagaattatagagtgctcaatgtgatttattcaacacataaaaagccaaccagggtctttaagggctggagattacaagagaccctgggtttaatcctcagtcctatgaaaacggagagcaagggggagaggaagacggggcagaggagcagagaggaggaagacaccatagactggaggttctctcacgggttggttgggtaggtgagatgtcttggcttcagcaagcccaaagacctgaatttgatgacctaatctcacagtagaagattaaaacctgtttcctgaatattgtcctctgacccccacaataactccctgcccacaagtacatacgtgtatatgcatatatctacatgtattatatatatgtatatatatagccatacctataatacatgctcacaagcatatacacacagaattcacacacatgagcacatagaaaaggagtttgtaaggtcacgctgtcagcatgcagtatgtactgtgtgcagtgctggatgacagtcacagggttgctctttaaaggcagctctatgctctgtctttcccatctgtatctccctgcatatcccgtgtacccacacaagttgcaggtcagttcacatcactacaacccattcttccatttcctttgaaatttcattttcttcttcgaaattaccaggatttctttactttgggggagggagaagcatgaaagaaaaaaaaatgagttttacatcatcctaagaaaaatccaaagtatgtattcaaccccagagttgaaattccagcagaagatgagacatctgacaggactgtgaggacacattctttactgaacacagactgtgaatttgtattaatatgtatatgacagaaaggcatccttcacttgtaaataagtttgttaaaccagcactttgggttgccctgccttgctaccatacttaagtgacagattttctgaagcttatgtctcaagtggcttggttaatgagaacctgacttcaacttaatgacttgtggtctttttgttgttgttgttttagattcgagatggtcctttccatcatgaccccattcttgggaaattctgtacttctctgtctaccccaccactccagactacaggtcccgcagcaagaattcatttccattctgactccgagactagtgacaaaggcttccacatcacctatctaacgacaccatgtaagtaacctgcccactgaggactgactccaacttgggagtgtgatgctgttctcacaggtgcttgtcatgcccatgcctaagctgaaggcgttctgaggttagtgacacaccttcatgagtacttcttacaccacctcagattcagtatcttcagaacattagacactacaatactccttagcccttcaactatgcgatcaacactacgatggagaccagaggcacctaaaatgaactaattcagaacctcagatctctagtggtgtttgctgttttgttgcatgcaagattgttcatgggaacagtatagtctgtctgaaaaacgttggcttcattcttggatcaagtccagtgcgcagaagccaacatccaggaaagtattgttcccgttactagagctcactcccatacacgtcactatgatgctctcagttccattcataccttggaacaaaggacaacaatgaagtagtgtatgtttttcatttgagtgagttagagaagtttgtttttgacacctattattgtgttttagagaggattccttgtaagtctctgtattaggaaaaataataagcagcccacccccccctcgtcccttctccctctgctttggcttcaggttgaacgcacagtcagtgttggtaattcctacagttgtaagtactattaatggtgacatgctgctcttctataccccctctcattcaatattcttctcttatatagttatatatgttattcagccacaatattctatcaagtgacttaaatctttatggaatgaagcaaagcactaatgtgcttaaaaagcaatttacagaagagagccatagattgggcagttcaatcacatctctgtatccacttctttggtctctgcggggatatgctgaatatatataaaactggaaaaccttgcagtgggtggcatgggctcatacagggtggaacaagccgggtgggtagggaggagctaaggttttgaaaattgaacgtaacggacagaggtcagccagatgctatcctcatgaccattctttcctcctttgttctcttcagctgatctgtactgtggtgggaattacacagacacggagggtgagctcctccttcctcccttgactggacctttcagtcacagcagacagtgtgtctatctcatctcacaaccccaaggagagcaaatagttatcaacttcacccacgtggagctggagagccagaggggctgttctcacactttcatcgaggtaacctttctattcagttacccttgggggacactcattacaattttcatgttctgtggagtggtggtcttcaaatggctgtcaagccaggtgcatctagatcaccagagagcttgtcagaagtgcttgcctttgctcagcatcactgcgtatgctgagggtgggaagtcaaagcagagagtaaaagagcaagagttctcagaggatctaaaagaatctgtctaaaacagacctaagaaggtgaaatagcaagagcttcaaaatggaggcagcaaagtgagaaaaggaaagtggaagctagaaactcagagtagggctacatcaatggagctcttaatcactaaggcacatgcgcgtgagtgaacctaactagatttattgatgggattagggcttcagagaggttttctagagcaattttgtatgtcaggcatcataacctagagagagtccaatatttgcccatggctcccagttagtcttgacacagacatgtcctttaaattattatgggaggggatcacaaaactggcactcagtaacttaattttgtaaagcagagtggctgactattttgtagttataatggaacttggttaataatttagttcttattttagttctgttgttagatgtctatataacttcaggcaattctttgagtattcagttccttcttcagttggatatcttatcttttatttaacctttgtgagaataaaatccaggaaaggacagagaaagaaagccttaaatgttattacaaaacattatacaaatataagttttcctagaccaaattttttctcttctctacatcataccagttcagaatcagctaaaaagactctactgtagctatctatacacctatttacattctgatgtatgcacagcttcataaggtattgatgaaaattatagaagattgctatcttaaacaaaaccacccattcacacatattcatgtataaactcacacatgcacacacatattcattcacagacagacacatatacatgcacacacacacacacacacacacacacacacacacacccctccacttaagtttctccttctaaaattacattttgcccatggtcagtgtaatatggctaaagaatgatgaggtcaaagagagattaatttttagttcatttgttcttgcctaagaaatcttttaaattgtatagaacagtattatagatgtgacaaaagtcatctttccataatagaaggcagtgactcattaatattttataagtggctcaagccatcaaaactactgtgaatgaaggacacagaaggtaataataaaagttcaaatttttattccagaaaatgcgaatctgggattgactaagaatatctaaagtatatgacattaaggccaaggcttggaagtaggctatagagggaaatgatttcataccccatttatattttccctagaacctgcatttcactcagggaactgtaaaagaagcattacaggagagggtgacagactggtgtggtatgccttctagccaaacagaggtgtttctgggaaagatcttccttcttagaaatgtgatgcatccttgcacaacttcagaaaacagccctgactagggtggaaaaagaatgaaagaaagcagacacacagacagacagaagagctgggatggtactctctgatggagaacctgcagcaccccagaagcttagcttactaattatattcagttgggtggagaggcagggttcttgcatacagcttaacaagaagctggaatactacttacagacaaacaaggaaatggaactattgtatataaatgaacaaggagacgggtttagctggcttcagtaggagcaatcaccataggagaggagtcttcaggccatagatgtccacagggagaaagggatggtgaacgtttcccccccacactgtcaacatctgcacacagggcataggaaggctttgagcctcatcccaggggaaagctttgatattttctcgtgggtctgaggctaaggtccttggcatggccacttccatatcaacaccacacaatcactcagaactttactcacccgggcctcctccactccccacagacatggaaataatcttatatttatgataaaaaattaaaaatgtattatacatgtgagaaatatactatgaaagaaatgtatagagctcttgacttgaatcctattatgactggttggaaatggctcccctggggacagtacttagtgggtatatggttgagcagttggcaacagaaatattaaaacaaacaaacaaacaaacaaacaaacaaacaaaaaaccaagggtgccaggtacagtggccaacacagtcccagaggctgaataaggtagacataggataaaccaaagccaaaacaaaagaaataaaatccaaacaaacataaaaccagactaatgtgactagaatcacaaagacagaaagaaaccagtaagggaagtgctaagctcttgtctccatatataacgataaagagatgaagaggttggggtgtcttctgagagcctgaggttattatcagtctcttagcattgtgcccaccccagtgagtggccacgacagcacatccacgatgagaatgggaaggagaagagagaggattgcatgctgagcttgtaatcaggagagaagatacttctggaaaaaaaaatagatcacattttcttgatcttaaaaagttcatttaaaaatcaagtaatatcattattactcagacactgcctgttatctctcatcatctatcccctgcatgctattctctcatttggggtgatgctacagtcctttcctctcttgccccgattagcctaacacagtgtctaagatcaggtctctctgctattgtgttatccgtcagcctgcaattcaattcacagggagtatgacttcacagttcatacattgaacgttaccatacggccaggctctcttttccaccctggtatcgtccaaacctccttgtctcagaatatttgatttgctttgagttaagatttcatacttaaatggattttagagtctggagtgtaaaaacaaatctgggtagttagcacacagaaagacacatgcgagcattaagccaaggctttgagacctgatctattccacatgtcaaagcctcttgctcactcagctctgcagttcacatttaaaatttcgtgtgaactgtgttttgcagcccagttaatcttagctatctgtacaggaaatagttcctttacaagaactcagggtttaatgagtactttttctttaggagctagttcaacctctaaatgccatttgcaatacttcataagcctgagttattcgttatatcctggggctctgggtttgtaatactcagcatttacaaaatgaataaataaatcctagagagacagtcagcagtgctcacttgctaaggaactaaccttgcaagcacgagggcctgagtttaattcctaacccatgtgcaggaacatgtttgtaatcccagtgcctgggatatttaggacaggaggctccctaaggtcatccagactatcgcagtttgtgagctccaggccaattagaaacttcgtctcaaaggaggcagatggcattttttcaggatgacacactaagggccccttggcttctacatgtgtgtgccccctcacacacgtgtgtaccctaacataaatgtgcacctgtacaaacacaagcacccacacttatacagtgaaacaaactaaatcctggagaaacccgagcctcgttcacacaacactggtgttttgcaccaggacctgtagttcctttgcaaatgtgaccaccaaattggtgaatttactgtactccctctgcaagggaccattgtgtgatatccatgacttcttaaaagaagggaaacttggttactacaaacccggtttcaatattagttatctttctctaggttgttttatggtaagcaattaataatgttccccaggcaaatcaaaagtgataacaagcaaaatccacctcatggttcatttgtgtgtttatttcctacccctgtcaacatgttgttttggaatctgttctgcttgaggctctgttgatatggctttggctttgtaggacccagactcctgatttctcaagaggaaaagcaaagaatgtttgagtcacccactgacagtcaaggcctctatgtacacaggttcatcacggctactcacattcctcaaggctgagcaattgctgtggcaaagcccatagtcaatgggaaggataagtgttcatgttccatcgggaggcatggcaagtcacatgacagagaatagatattcaatcctctcacataaaagcagtcagtaattacgaagtatgagatagtctattctagcttccaagcacaaagaaaagagatttcttttgggtgagagtacaaatttacaagtgcttagtcattaagtacaagtgaatttgggatcagttcaagcagttgataaattttattccagtatctctctttaaaatgtgatggttaaagtactgctgtgcctgaggtccagagagaatacaggctttcagaattaataaggtttccttccacaaagagaaatacagccaaaatcaattgtaccttccaggactagtgcccttgaggcctgaaagcctctctcataacatctggatggcagctgcattcccttgctaacgtccttgagcttcattaatcaggacccaggggaccggccacttcacctagctccaatgctgcctggctgtttttcttccttcttgtcatcttctaatggactaatagaaatgagagacaatgattgtagaagaagcaaatagaacccaggggatgagagcagggtaccatattactcgagtttcctgtgttctagtcttcgggagcagcagtatgtatgctgcctctgttaaagactgaattgaagattgtgcactctcacgttaattgatcaacaggaatgtatcaaatgctataaatgcctgtttacaggctttgttttgcttgtcttttggtttggtttggtttggtctggtctggtttggtttggtttggtttggtttggtttggtttggtttggtttggtttggtttggttttgtgagatactaaagggacactttcttgtccctctgaaacttgcttttcagtcaagtagcataacttgacttaagaataagaaattcgtgttgcagatgtcaagagcttagactaaggaactggtatgagcctgactcagtggagtggcatgcgattctctcacatggctgaccttttaaaatagcttccgttcttacctttgcagaacatccttgcgtatggatccacatgcaagtctgtctgcatcttagacgctcttataggtttaatgcccataatatattactgacaagcatccttcttgaactttgtacttctactagttttggatgagaggaacaatgtcacaatatcccaccaatctttcccttactagctactgcctttaacctaaataattcttaatgaccttggactaaagacatgtctcctgagtattccataattctttgcatgtatccgtcttagagcactccataatttcctgcaagtgttcagagcacttttctactatcagattgctgtgtgtcattattttactattttgaaatgaagttcatctatatagatttccatgcactgtattaaaacattgttatgagtaaacttaagtcaacaaaataaataacatttattccaatatgtgagagacctgggcaagccccagcttgagataaaacacagtcagctgttcttcccccaaaactgccaggatttctccacaataaatgtacactgatgaaaacagtattttttttttcacttgtgttccactgattgtcctggaaaaccatgaatatttaaaattcccaaaagtaccttgtttaatacctaaacatggacaacattttgtgcttcagagcaatgagtgaaaatcacacagggtgtcagggaacccttgggaatgaccatcacatgtcagactctctaatgaggtgattcttgtttgtttgaagacagggttttcctgtgtagacctggctatggtggaactcggtttatatagaccatcacaaatgtggagatgctcctgtttctgcctcccaagggctgggattaaagtcatgtgccaccaatgccccgctctatactagtcatgctccaccaacatcagaataatagataaaaccaaacaaaaacaaaaataaagtttcccagattcctaattgtggtactcactgagccgcagtgttaagtgacaggactgagacctgctcacgagtttctgtgagcactgacggtcccacggggctcctagcagcacagggctgcttagttagcaataccttgataatgctaattgagagtagattaatattggggctactctgccctctagaataattttatgaagctagagtctcatgtatactctttaaacaattctcagctgtggagagtctctagtgtttcaccttttcaaatgtcagaaatatcaagagctcttctcaagtcaatattttattaccagaaatcttgggaaatttcactgccgtctcacatattccttcccatctcattagctaggcttagatggaataacttgttaagattatgaaggcagcgagcttgtgacagatggggacataaggggcccactcacacaggtcgtggccactgaactgaaaggtgtggagtgttgccttaaaccaattgattgtattggaatagtttgtttctcttctctcttccatactcttgctttaatattcattacatgtatttatttatttgtttcattgtgacggtggtaggagttgtactatggcagacaggtgggaaccagagaacaacttacagaaatcagttttctccatctaccatatcagtcctgggggtccatctccagccatcagctttggcctttacccaccgaacctgtccattaggttttaatcaatcaggaatgccaacaggtgttttatcacttgagctattatgttgtttggtatattaggctagcaatagtgtgcacatttagttttctagaactttgtttaggattctgtatatatataagtaagggaaattgattcatggttttaattttacttatgttgggatttgatagtagagaattgtgccgtgcttgaggccttatacatggggaattatctagttcttaaaagggcagaagacttagcaaatgcacactattctctctgagtgcttccctctcaggggaagcaggcggagaagctacccagcaatcctctgttttatccatggagcagtcattcccgttttcctcttcttcacatccttttactgatttatataattttattaaaatagtttatcttgagcattcaaatacatagacaaacaattgtatacaggattgcatttaattaattgcatgtttcttagactgtgtgtttgtgacttgtttataaatttttttattttgtatacttagcaggcatatattttaattttcttattagatttgtctaaaatttgcctttggtatccccattcccaactctcctttaaaaatctgttcttcagtacatttatgattctactttctattttaataatgaggtttaaatcttagcttttaatttttaatggttttattctgtttttagcagattctctctcgcccttctctctttcctctctctctctctctctctctctctctctctctctctctctccctttctctctctcctcctcctcctcttcctcttctcccttgttcgatgaccttcctatcattttaaaatgtttttggtaatgaactgagtttattccttggattgcaaattcacttaaactttcatttcttgatatgctgtatttttggtttttgttgattgggcaaattgtctgcagttacagatttatggcctcgttgatgttatggaaattaagacattttaagaatcacatagttacaggctgtattgacttaagattgtcatcaacatttgataccagttgtttgtattaaaacggacccactgactacttctaaatataatatacacactactaaattaaacttgtatttgttttgcttgtgctattgaccagtctccaaacactactacatctaccaaagtgactttctaattagcaatacaaatctttctttaattttctgcttaggttggagaccatgagagcctgcttcgaaagatctgtggcaatgaaaccttgttccccattagatcaatttctaataatgtctggatcagactgagaatagacgctttagtccagaaggctagtttcagagctgactatcaagttggtaaggaaacttctgcttgtgtatgtgtgtgtgtgtttctgtgtgtatgtgtctgtgtgtgtatgcatgtgtgtacaccatgtgatgatagaggccagggtgttggtgttttatctcttcttcatttcctttccaccttattgagacagagtccctcactgaacattgaactctacgatccagctggatttgctggccagtgagctctagggagccatctagctctgtgctttcagcccccacgcccagggctggcattgcagacacacactgttgtacccagcttcgtgggtgcttgagaacagaatgcaagcatatacaacgagcactttattgactgaatcatgttctcatccctatctatttttaaaattatcttattattttacacgaatggactctttgcatacatgaatgtctgggcacagcatatgtatgccatgctctcagagaccaaaagaactgtcaggttccttgagactggatatacagctggttgtgagttgacttatgggtgctgggaatcaaacctagatcctctggaagagcatccagggcttttaactcctcagccacctctctagccccctaaccatcccttcctacttggtttttaaatgtcaaattcacacactattctaacattttaatttgagttattctatgttcttgaatggcaggaaaaatagtcccacaaaagtgtcatattctgctggttttttagacagatttgtaatgaaattgaggtcaagaattctttatttctgagctaacgtggttatcatttttctatttacagcttgtgggggtgaattaagaggagaaggagtcattcgttcacctttctatcctaatgcatatgctggacgaagaacctgtaggtggaccatctcccaacccccaagagaagttgttcttcttaacttcaccgactttcagattggaagttcttcttcctgtgatacagattacattgaggtaagagtgaaagaccactgcattattcctaaaggaactatatacatttatgtgaaaaggacttgtacagatcaaatatagacataaaatttcctagcataatgctacttaatagaattcagtatatatatatatatatatatatatatatatatatatgtgtgtgtgtgtgtgtgtgtgtgtgtgtgtgtgtgtgtatgtgtgtgtacatatatatatacatacatatacatatatatgtgtgtgtatatgcacatatatacatatatgtgtgtatatagacatatatatgcatacatatgtatgtatgtgtgtatacatacatatatacacacatacatatatatatatatatcatgatgaaagcagatttatactaatgtatgtagattaatatgtcctaaaattcattgaacattacagtacaaaatagaacagtatcagtaaagtaaaaaataacattatcacttagtggaatgcacaaaaagcatgtgacagaatctacatgcatcttataataaaaacagtcaataaaagaactctcttactttgataagaggcacaaaagctgccaagatgccatggtacacagtgatagaggtaccacatgctttgcctcagtgactggttggtagacagccttgtcattgccacacttctgctcagtattgtaccggaaattctaactagggccattatacaagtgtaaaatataccctaactggaaagcaagaaataaaacttgttctgctcgtggccccaaagaagaatgatctacacgccctccacagttaccggctgccatgagcctcaccacaggcagcaattttccaaatgggtatttaacaaaaattaacttggctgtatctatttttccttagattggtcccagctctgtcttgggatctcctggaaatgagaagttttgtggcacaaacataccatcatttataacatctgtatacaatgttctttatgttacatttgtgaaaagttcttctatggaaaatcgtggcttcatggctatgttcagcagtgagaagttaggtaggagcatgtttctctctctccttttatgctgctatcagaataaatggacagttgtacagggatgtttatgtgtgtaaggctctaggttcaatccctacctccggaaataaaagttccttacaataaagaaattatataaaagtcgatgttttccctgaaaaattatcaagtacacttaaaaaaagactatactttcaacaaatacttaacaatagttattgcatacctattaacaaaagaaactaagttattataagtcacataaaagaatagcattctctctttgcacgtttaatcaatgataagcacattttattttggagcctgtgcagattaacattaactgttgtcacaatgattattgcttttattttgggactcatgtaactcatttattaacttctgtgatgatgatgattgttttattattactaattattactcagaatgtggaaaagttctcacagaatctactggaatcattgaaagtcctggtcatccaaatgtctacccaagcggtgtaaattgtacctggcatatagtagtccaacgcggccaactgattcgtttggtattcagctccttttacctggagtttcattacaactgcgcaaatgactacctggaagtttatgacactattgctcagacgtctcttgggaggtgagaatgtttgtctttttatgctgaactttgattgtatagtgtttatatttttgtacatagatgaacagagactataatgcacttaaatcattttatgtccagtttattttactttataaattagcaacatattttgaccttacataccattatattttgaagtaaataaagtgcatagaatagtaaggtcggccttactgatgaatagtatacatgatttagtatagtcacgatttcatgggcaataacacaaaatatccacctggtgcacattttttaaacaagcagtatgacttcgactatagttaccttgctatgtaatagatatctcagaatttcttctcctttgtatcttgaattacctgtcttttaccaacacctttccttctttacccctcccccaattactctaggtgctggtaaaaccattcattacattccctacaactttagaatcatatatcagtgagatcatgtggtacttctgattctgtatctggcttatttaacttaataatcatgccctccaagtttacctattttgttctgcatggcaagattttattctttataatatagtgttctatggtatttatatcaacaccacatcttctttattcattcattcatctgtggatggatacatctattgatgtatgtcttcagatagtctcagtagtaagatcacttgaccataagatagttaacatttttaattttagagaacttctatatagctttccacaatggcttactcatatacccactaacaatgtataaggttattttttcccaatatttcccaacaattcctctctctctcttttgatatatatttcaacagtaataatggaatgagattgtgttgatgagtgagaatcactccattggctatgcatatgtttgaatgcctgatccccggttagtgcagctgtagagaaggattgggaggtgtgggcttgttggagtagatgtggccttgttggaggagagatgtcactaggagtaagcactgaggtttccaaagcctactccagccgcagtcttacccagcctgctggctgctgatcaggctgtaaagccccaaactagcactctagtgccatactgtctgcttcctgcaatgttgataatggactagccctctgaaactgtgatgaaggcctcaattaaatgctttcttttatcagagttgtgttgatcatggaatctcttcacagcaacagaacagtgacgaagacagtgatagtgtatcattgtgctcttgattttgcgtctcattgttgatgcataaataacaccggtttctcatagatccatgattcatctctatgccttgtttgtgataattgcctattcagggcttttgtccattgtttttatctgagtatttgcttcctgttgataatactaagtgatttgtagtcttcatatttcttgggtattaactgcttctccattgttatgtagtttgccattaattctcgttctatgggctgagtctccattctgctgtgttcttagctatggggaagatttgtatattgctagaatcctacttgtctgtcttggcttgcctgtgcttttgaagttgtagctatagaaatccttgtccagaccaatatcataaagtgttttccctgtgttcctctagtctagtcacttcatttttcacacttaacactatttgaattgatttttatctcattgttttgtatatgcatgttttagttttcattatttagtaccagatgactgtgtatagtctgtaactctatgttttgattttcccatgtttcccataccttctagatctatttgatagttataattattttaatatctttattcattcagtgattatgtaattacttgttacgttttagctgcttattctctcttattatgagttgtactttctttctttttatatttgataatatttgataagccgttcagaatttttaattttatgtttaggacaccagccattttatacattcttgtaaatatgtatttggactttgtcctggaatggtgttaagttacttgaatccaagttggtccttttcagtttcccttttaattaatttatttcctgtccttgaggtttttcccttttcatttgatatttagtgtcttgagaagctcttatgtattttccctagcgtttcagatgtttgagtgcaaagttaaacctggcctctattattatgtttgtgttgaaagtagaggtcctctaattgctttttgaacatttaaaaatctatctatctatctatctatctatctatctatctatctatctatctatctatgtatctatctatctatcgtttaccagtttcttggctgtatgtatgtccctggatcatatgcatggtgcccacagaggcccgaatctgatcccctgagcctggagttttgggcagttactactatcttctgtgtagatgttggtacttgaacccatatcgtctagaagatcagctagtgcacataactgctgagccatctcttcaacctcctctgattgcttctctttaaagtcctcttgtatcttcttttcttctcctttattagctttgtaagcattatctttttaaagtagtctctaaatttcttccctcggtctttactgctcctcaccttcttttgcttcttatcttagccttccatctaaaattgtctttgtctttctttaaaataatatatgagtatcttttaaccatgacaaaatgcagtttttgctgaagggaataagctttaatgatcatgtcccaatttaggatgcaagaccatgtgtgcacagttatttaatctgtcttctttcagtcatattaagatgataactctctgttatcactaaaatattattctacatcaaacttatttaattttcctgcttctcatagtcaacattttagcttatttttgcttccatattattttcctctcttgttccaagcatgcgttgtctctagatttccctttttctaagctcttcctcctacaggtgtttctccagatgaaacaccgtggcaccgtgtgatgtactatagctctgtttgggggattatgagaatagattttctgagtaaagcttccttcgttctgaagggacagagacgtggtttcctggtcacactcttacctcttcatacatgagctgtttaaagacagcagacaacttacgcagaggtcactgtccaggcactgctctcaatgcctagcttcagcgatctacctgatccagatgttcagaatgatgtgaagtctacggagaagatgacccagaccaattaaaccatgtgtccaaagtcacagtgcacctgagtggcagagctgtctagggctctgctggatggttttggatgctttaatgtggtagtaaatacagtaaaggaacataattcctttagcataggtctaggaaagagttgctcagtgcgctgacagcaggtgcctgcagtctgtgcttcctggtctcagaacatttttcctgcatgttaaggcattaggcgtgccacacaactcttccactgcgtttctgttattactgaaatatacttggtttcaaggttgatgtgaaatagataacagcccattgtcatttgtattattttcgtctttacatggcctattgttcagaatataaggtcaaatctactaatctgtgtctctcttctttctttctttggaacagatactgtggaaaatccatcccgccttctcttaccagcagctctcattcaataaagctgatattcgtgtctgactctgctcttgcccacgaaggcttttccataaattatgaagcaattaatgcatcatcaggtaacatttcctctgctgcaaaagatgtttaatatctaaaacacacaaatacttacttggagtaaagtataaagacaagatccacccaattaaaaatagggtaaatctgttagctaaactgtgtgctcctttagggattctggaccttaatgtttatatcagggttagaagatgtttgatacagaaaagtagcatccagtgcatagctacagctgtcacatgttacccctacttgccaagcattccacagcttggggcatttttctgggcctggacatattcctcttgagagtcttttgtccagccacctttgaggtgtttatcttcttacacctgtattcctaacataaatatagaaagaaaaaaaaattcttactcaaaatccctagccagtttttcacttatttctcctctagaaattttggtcactatactttaatccaggcaaaagtagttcagcttctgtgttctggaagcatggctttaaactacaaactgcgggagaactgtatacattgatcactggtgggattcactctagcaggtgccccattatctagcccaagcacatgtagaggtaaagcgcaaggatttaaagtatggtgtgttgtgctatgtaactgacattttcactgaaccttattcaagtggttaacagccaaagaccaaagtggatgtctcaggaaattacagtgtatacacaattttctatacttctgtagtttcatctctctcatatgtttggtcccaaaccacaccaaatattcgatttggagtaaatcagttgaactctgtggaatacaattttcttatctgtgtaattaaaagataagatttaatgatctttcaatgttttctggttctaatcttctgtgaacacaattttaatttgctgcatgaataaactgcttatttcttaaatagcatgtaatgtgggcagtacctcctgaaaatgtcatggcgttctctgcactagtatataaaaatgaagcatagttctgtaatgactgaaatgattgtgttatcactacactagcttgggaggcagtatgaagggaagagacagctaggagccattaatataagctggggatgaggaggataaatttaaaatttaatgaaattgttcagaaagataaaattcctataaaactcatcaaagtaataggtccagtagacaggaagggaaactgatacagagagtagggaatggaatgtgctcagtgctagcatgtgctcagcatgcatgactaggttcagttcttcccagtacttctaacataaaagaggaaacggaagggaggaaaccccaagggctcaaaaagaagacactgaaggagcaactccagagactctacccctgcttccctgtgttagtcatgactccagcccctacttggtctagacagagcagaaatcacagaaaagagagtgcatccttttcaccacttgactgatgactatgtatctacctttttttgaatgagctcataggactggttaacacagtcccaccatttgaaatagcaatcagatgatgagacccagaaagtcatatgggtggctgggttgcatgagttgttgaagctggtcctgtagtaaaactcagagcacagctggctcaggagaccagaatagaggtggtggtggtcaggcagttagctaatgctcccaggagcttgggtgaaatgagctgctgactggaaagacagaggggaggactctcttcagctagcgtcttcttctggctaatttctgtagactgaaatcatgttggataaaagcaccagaggacaggcaatcattggcctgtaagctatttccttgttccaaaagaagttatttttggagtaacgatgatggtttggactgctgaggtctagtttcttaccacagcccatggacatttcccttgactctggcctgctttcatttaatagagtcaaattttcctgatttgaatcccgttacccttctatctgtagttcctgcaataagtctatgatgtcagcctttaaacatgtgtttgggagtaaggagattggcttcttgttcatactctgactccctccctaagtatttggctgcagctctcattcaaatattcctgagaatatatagaaaacaaatgatataacaaaagtaacgatgttggatagaatctcataagaactctttaccactgattatgacatccaacatttattagcatgaagtaaaatatttgcatattgagataatataattggtatactttacaatttaaattattatctgatatcctataacaagtattacttatccactgtcttaatatagaactagtaagcgaaaactttacaagtatagagaaaagcatatctatataacgactactccattattcttcaaattaattcctgattcactcatgactatattcattaaaaatatgaatgagaaaaagaaaaacagagtggaaattatcagaggtaccatacaaagttagacttctcttcatgaaaactgtctaaaaagctcagtaagcatgattggattttatttttgtgacgtgtctagaaaatataagtacagtctttcccaattaatctttgaatggaggcaatatcagtctagaatgttgaatctgtcgtcccaagaataaacagctggctggtttaagagccaaactaagcaaacaggcttcactatgctgcctgtttctgttgtcattctctccagggctacagcggaactatgaggaatgtttcttacattttactaagagaagagcttcaaaattacccagggaagtagctagcatggtcccaagcacaatcttatgagcaaatatccatataaaaaggtgaatccactgggatttccttctgtcttacactaccgtgcaagttctcatcagtcaccttggagtgagcccagaaagggaaggcaagaagttaggaagtgataaccaagagggtcacaagggatttatttcaaagaaatgggcagagcacgttctgtgtcttttcttatatctccgtgtggtaagagcaatgttctcagattagaatggtcattttaaaacatcttcagaaagaagagattagctcagatgttatggttataagctcagatatcattcttcaattagaaattctaattaaggtctttggtatagttttacagaacaattcaagcagatctagttgaattttgtctttatagtttatttaaaaactgttataaaagatagtaaagaactattatactcatgattgcaggtcttattcactgcagattgaaactaaggccagagagtgtctgctgagtgacagcttgatgctggcttgaagcagcttgggcaggtttcaggcttcccttgattgtatacctctatctgaaatttctcatattacatgctcaaatatttttgagaaggtttttttttaaaggaaatctattaatctctaaaataatttcctctagtaaatcttaactttttttaatgtttcgtacaaataacccatcgattcacttctaggttttgtgtgtgtgagtgtgtgtgtgtgtgtgtgtgtgtgtgtgcacatacacatgtgcacatgtgtctgttgggccttagaatgaaaacagtgcttaattggggtattcttaatcccttacaggtctaaattgacatttccactgtagaaaactagggatcataggctgagggatggctctgtgggtgaactatctgttatgtatgcatgagacctgagtctagatcccaggtacccatgtaaaaaagtaaaaccaagcctggaagagcacacctgtgctctcagtgctggaagggtaggggcaggaagagtcccagggttctaggtcagataaggaaccctttctccaaaactaaatagaaatatgattgaggaagccatctgacaatcaacctttggtctctgtacattccctacacactagtacacatgtgtacacacatgtacacatacccaaaagagaaactagagatcattagagagttcaagatttgaaaagagtccaaattttatctggtgttcaatctaaatgaattttaaaactaatctcaaagtctcctattcctcttccacacatctttaactagacatgatgactatgttgtttcgatataaaaataacattatgataggctggaaggaccgttcagagatatgtgtgtgtttagaccgtaccagctatgttaaaaaggtagatatgcatgtgtgtacctatgatatcagggttgggacagagggaacaggaggactcctgggattttctgaacaaccaggcaggcagaatcagtgagctttgagtttagtgacagatcctatttcaaaaattaaggtggatgagtgatgaaggaaacattggtattgatatatggccttcatgtgcacatacaaacttgcacatgaatgtgtatatatacagagacacacaaattatattacatatgtaaatgacatggctttgtcagatttaaaatgtgattgctaatatcccccagagttctgtaatagctcctctgcctttattcaacagcatctgatatgtcatctgtggggtcaaagaaaaggcagtgactgtaatcacctggcagcaaactgtagcaaaatgttagattgctcttccgtgagagaggaaaatgtgtaattttatcttccctcacatctttgctttgaaagtatagacttcaatacacaatgaaggcctctgatgtttccatatcagtttattttatatttagaaaagcagttttcaagctgtgagtctcaaccattttgtggttgaacacctctttcacagaagtcacccaaaaccattaaaaaacagatatttacattacaattcataacagtagccaagttaccattatgaagtagcaacaaaaataattttatggctgtgggtcgccacaacatgaggaactgtactaaagggtctcagcattaggaaggttgagaaccaacgatgcagagaatctgagatgatatgcattcactcagaaaccaagttttacatgatcttggaaactatgcctccctaagcaatgggttcccctgtccacagtacctatctaccctcttcttgtgccttggtctcagggagctaatattgccatggctttgtgagttgaaggactcccggtgattcccagttttcccattggccacctttaattctatggtgtaaaagtttttatgaaagtgcttaatcaggcagaaaaacatggtcatttttagaaaaatgtagttttgtaatttttttattagtctacagagtttatttttgacagtatattgtcttttgttgggtatctattaacctgtgtgtgtgtgtgtgtgtgcacacgcgctcaagcatgtgtgtctggaatgcaagtgtattcttgatcagatggtacactcaagtctttttcccttcattttatggctaatgggcttctgttttctatatagaaaatgtttgcttgtcaaaattatgagaccatccctctatgtatcttctagaagttctatagcttgaacttttaggtctaaaattcatcttgatttcctagtatggtggtctaagtttccaagtccattcacttatgaaagtgatatttagtggagcaaggccatgccttaaactcatctccctcaactctacctacccccccccccaacatatacacacactggatttcctttaacccgttgctgacaattgtccaagtatattacatgtgtgcctctggaattcttactctgtcccatgatgttcatattggaccttatagtaaaaggagagtctgttatacaatattattggcttcagggagattttcacaacagcatttgcatttcaaaatttttcttttggtgatcttagatcctttatattgccatacacattttagaaactgccttttgggtttttttttaaccatttaaaaaaattgactgaaatcctattgaattcatagatcaattgggatcttgggacattgcaaactatgtcttccactccgtgagcatattctaacttgatggctagtcatactttctctatttctatgagcacttacttaaagctctgagtgttgatttttgcattttccctaggtcatcatgtgctttatgctgttgtatgctgctttgtgcattatattccagattgaccaatacatgcatattaaactgattttccagatattaatcatgtattatgtaggcttttaaaactcagtaccaactattttttggatacaaaacatacataaatggtcccaactgtgaattgctgttttgtgctgttcttcctttctccctctttcttattgcagtgagcaggactgtacattgctcagcagaggggtgaggctggacatactctattcttcattttggcaagaatgcatttaatcttctattctttaagaactatgatgggatctcatagatttctgtttttgtcttgtttattgagagtcttcatcaaggatggatgctgattttttctgaatgatttaatcagaagattctttttaatccagttaatatgatggattacttagattgatttttcccacatcaaacaatctgatactcccagtgtgagcaatgcttgctataatatcatcttcacattctctggaactatatgcttaagttttttttcaggtattttatctgtatttatgaggcatgtttatctgtagtgttcttgttgcaagtttgtcttgtttgagcatagcagtaatatttggtcttaataaatgagctagggagaatcatctcttcttatttcccaagtctgggtagttttaatatttccttagtttgcttgactatcaccaggggttattcaaatacattgttttctttgtagaaaacttttaatgacagatagaatttcttagcctgattgtggccatggaaggtgttattattttcttttgagttagctgtggcagttggtagctgggaacaaatttgttaagtttatcacactgttcttttactgactggagattctatagtgtttcttcttctttcactctttttttttttagtagatattttcttcatttcaaatgatatcccaaaagtcccctataccctcccccccccgccctgctccccaacccacccactcctgcttcctggccctggcattcccctatactggggcatataatctttgcgagaccaagggcctctcctcccattgatggcctactaggccatcctccgctacatatgcaactagagacacaagttctaggtgtgtgtgtgtgggggggtactgattagttcatattgttgttccacctatagggttgcagacccctttagctccttgggtactttctctagctccttcattaggggccctgttatccattcaatagctgactgtgagcatccacttttgaatttgccaggtactgtcagagcctcacacgagacagctatatcagggtcctgtcagcaaaatcttgctggcatatgcaatagtgtctgggtttggtggttgtttatgggatggatccccaggtagagcagtctctggatggtccttccctctgtctcagctccaaaatttgtctatgtaactccttccatgggtattttgttcccctctttcactcttaaaaaataacaattcatagtttttcttcttcacttgaacacttgtgctagaaatctatcaaatttaatttttaaacaatggggctattttttatatcattctctatttctgttccattttccttgatttcagttctcacctgtggtttttctaactgtatttctatttgtttgtttgtttaacttgtttctcgtgagaaattgttcaaaagggaggggcatgaagccagtcttatcttcaactgtagcatggtggtcttctgtgttctattgcataaggatttcctcagagcacaagttctacttagggaagggtgcacacacaggggtattcccacctagccagattcaaatagtagtgctcacagcagatggctaagttctgtttacttttcttctgtaaattgtttgggtcaatatttctaatttagcctgataaattttacttagtagtattcataacagtatgaagcttttaagatatgcctctttcctttctaattattgctccatctcattgccaccatcttttcttcctctcttttacctttattcacttcctcctttcttgacttccctctgagagaacaagcactgcgagcttcctcaatacagtaaagccttgatttgtaaactcaaatatttgatgactttttgttactcataggtagtagagtctattacatttttgtgttcccaataccaatgataattctccccgtcgtggatgaatatatggcagcaattgaggaaacgtaactgcacatcctcagcgtttatttcacttgcaacaaagtatacatattacctcgctctctacagtttttagtcggggattctgctactccaagtccccagatttaggtcattactgagtgaaatttgaagctagatgtatatcacaattaagccagactttctttgtcaaacatgtcagattgtaagagtataagggagtgactggttggttattgaacagagtctgaggagactgaatagacaaagtgtacacaaactggagcagttagtgcttaattaggatgcagcattccagatagacttctaataatctcataggaacagttaaacttactcctcgtaattacacttctccttggcctattctgtttgaaatatattgggaattattgctacatatgtttggcaaggcagattttttagctgaatcaaactatacccaaggtcagcaagcatctccatcatagaaaagagagaactgatatcaggagatggcatggtgcgctcaagtagcctgtagatagtcaagacaggctttgatagaaggtcttttcaactgtgggtgtgcacagccacacctagatctggcctcccactccttctgcatgaccaagactccaacctggtcacttctcatgaatgcatatgcttataaagggaagttatggagagaattacagaaatgaataatttctaagtctcctgatatctgtgtagtttaacctaattattgtttatggtaattttcatgaattagaaaaattgtaacacttctaggactctgtcattctgtcaaaatacatgtaactatgtctttctcattgttaagattttagcatttgattgcatatgaaaatttgaaaatgtttcaaaatgagatcaatctttaaatattaaaaaatactcctgaaattcaagtacaggaacacaaattaatgcattgtatatgactagacacatgcaagttataatgcttcccatttttctctctgtttcccttcacagtgtgtttatatgactatacagataattttgggaggctctcctccccgaacttccccaacaattacccccataactggaactgcgtctacaggatcactgtgggactcaaccaacagattgcattgcatttcacggactttgccttggaggactattttgggccaaagtgtgtagattttgtagaaatcaggtgtgtgcttttatttcattataacctttattttgattaaaaatcttcaaagaaaagattaatgggaacatggaatgttttgtaaaattaccttatatgttcaacattataaaatttgtcattttaaacatgatatagaagaaaaacagaaattgtataaatttgatggttaagttttacttcttgatttaaattatgcttacatgcatgcatatgagtgtggttatgtgtgcacgtaagtggctgtggaggcaggaagagatgtttgatcctctaaagttacaggtggttgtgagctacccattgtgaatattgggaattgaactctgctctttcgtagagagcagtaagtaatcttatgtgctgagccatttttccaacctctgatagttacttcaagttcttgtattaggaacattttacaataattgtcagagtttacttaggcaaaggaagtgctactattccaaaggtgatgctcactgtttttgacatgcaagtttcatttctgttgctgtgataaaaatatcttatgaataagaaacttgggggaaatggggtttatgagcatacagtttcaggttacagtctgtcagagcaggtgagcaaagtgccaggcactaagtgagtcacatcataccctcagtcaagagcaaaaagaaataaattcatgcatgcttctagctagcttgcttcattgcttgtgcccagcagctctatttctctactctcatataggtcaggactccctgcctagggaatgatgtcacccacaatgggctgactcatcccatgttgattaacttaattaagacaacaccctcacagacagctggccactggccaacccagttgctccactgagactcctttcccaggtgatactgggttgtgtcaagctgatgatcaatacctactaccacagacaagtgccttcattgtttatgtaaaatcagtctttttggtctttgttgtccacctaatctaattgcatcactacaatcactgttacaacagcatccttaccttgtgtttgaataatagaagtctaggattgtggatttcagtgtgtgaagttttctttcactgaactttgaaagaatgtattataaaaattatatcactgacagtggtatattggtataaagatattttcttataccagtgcatcaagtaaaattaggctgattgctttggcaagcagctatagcaaatatttgacttgtttcaaacttgtaatctttcaacattttatgataaatattatcctttggtataaagtaagatacaaaattaacaaattacaattgacccatatcacactaaaccaacagttttattttggggaagtgagaagtttaagagtctcactctatagcctgaaatggacaagaattcactagatcatccaggctgtcctcaaactcagagaaatcctcctgactcagcctactgagtgctctgtgattatagctgtgaattttcacacccagcttaattttcttaatttatagcagctaaacacttggtttcactattcaatgagtcatcctttaaaaagatacctttagatttaaaattcccaacacttcttaggaaaataattatgtctacaatagttccaaacacaacaaatatgtcatactacatcttgatgatttcaaaatcagcaagaaatgtaaggtttttcactaaaaatattgatttatactgtcaataactatagtttctatattctgtatcctctgatctacttggctgatgtctttagaaagagaatctcaaatatatgctttactcagatggtataaagatgccagacaagccatagataatagttattgttcgccccccccccccaaggtcatgcaaatcgtagttagtaaagaactgagacctgagaacttaacattaagttttttaagtagtgacgtcagctgaggtgatgaactgctcctctgcatccccatgcttaaacatatgtgtttattgtacgctgccatcaaattgtaagtcagtccactttcatgtctctccctgtcacagagatggaggcttcgaaacgtcaccactcattgggatttactgcggctcagttttccctcccagaatcatctcccacagtaacaagctatggctaaggtttaagagtgacacggcactcacagcaaggggtttttcagcttactgggatgcgtcatcaacaggtaagtagcaaggatcttacattttcctggagaaaccaagctgatcgtgtttttcatttgtcatgctatgtagccacctgtcaatttttctagctatcctttatcattcatcattttttataatacgctccaacatcctgggtatctttggagtcctagcatcatacattttgaaggaagaggaaagttctacttccccgggagacttcaagctactcatcttgactagataaaggaaagcacatgaatgtgaagaagagctttagatgactctctgctttctgatgctttaaagaggagcacaggttgggtggtgggggtgagcccctatgatccagaaataggaagcagagacaggaggattccagttggaggcaagcctgggctacatagtgagtttttgtctctgaaagccactggcttgaggtgcatgcctcagtggtagagctcttgcttggcatgtgtgaggtccagggctccgaccccagcaccgaatacagaggacagtggagtgtcgatagggtgttttagccaaggtttatcttgcagaaagaaaaggccatgcttcccccactgtgttcccctgcaggctgtggaggcaatctcaccacccccacaggggtgctcacatcgcccaactacccgatgccctactaccacagctccgaatgctactggcggctggaagccagccgtggcagccctttcctgcttgaattccaagacttccacctggaacaccaccccaactgctctctggattacttggccgtatgtatactgtgtctccatgtcatctgttgctcctccttactcaatgcacaaaacacatttaaaaattattcttaagatttaaaaagcagtgagatttaagaggagcatttacataaaagatttaagtgaagtgaaatcttaaaagtaacatggtaaaaatgacagtcttctaagtatatgtacctagtgacttgagacataaagtatttaaggtaatgtaccgtaagctataaagatgtatttaacatatgctgaggagttatggactttatcctaactacaatgtccatgatttcagataggcattggaagctcacgatgctctggtttattgaggagaactagaggagatgttaaattcatctagctataggtttttatatagttcttgcatgtcaccaagttcttctagaatcctgtaaataaaatgggctgatgttttagactttggaataaaagaaccagcaacatttttcagttatggtctcaattttgtttattgaactttctttatgcatgcttagccttcagtctcagtcagactacaattgtagctcacatgctgactgtcaagcatctgtttattgaccaagttcagagatgcttatatggaattcaggactggctgtttttaaagcatatgcccattctgtcctcatcttttttactgaagagtcctttgcacttagtcttgactgtattatatgcaaaatgtcttattaaaggtgtttgatggcccgagtaccaactcccgtctgataaataaactatgtggggatacaccacctgctcccattcgttccagtaaagacattgtattgttgaagctgaggactgatgcaggtcaacaaggacgtggctttgagatcaactatcggcagagtaagtgcaaactccagcagtgaagagcctccagcagacgtccagacttacttagccaaactacccagataacattaactagtggtttgaggcgctggaactagacttaaattcttatgtgaaaactccaaagtcattgaaagggaaaaagcttgcatattaaatccaatcacatattagccaagcatctggtaaaacaagaaactcagggtagtttttactctgtggagacagctgtagttcagctcaggatcatgtgactctctaatggcatgtagattccagtcatgccacatgttacaatcctttaactagacattgtccagggaacagatacctgtcagcctaggttctgtcttctgcctgagttttattcagtagagaagcgttcatggagaacacatgtcctccactctagaacatcttctacagtaatgaaagatcttcctgatctttcttctccatctcctcttggcataccgagttcttcagaaattctcattatcctgtatacaaacagcttcttaaccctccatgaggagtgtttctgcttgagtgtatagtcattcttttcattttgttattgctttgcctctctttcccttggttattgtcaggttattaagccattcacctttgatttcccccctccaatagttttttatacataggatatcagtccttacaggtaaaatcagaggctgggaatatggatcagttagcagggtgtttgtctagcatgaagttctaagttccatctccagcacttcattcaactaagggtggtgacaagtgtacacaatcccagtatttgagaggtggaggcaggaggatccgaattcaaggtcatctttaattatataactagttagatactagcgggtgctacatgagttctttccaatcagcccccctccaaaaaatccttgctgtttgaaattagaaacttgcagacgatatcatttgtgagatgaaagaaccagctctgtgagtttggaacatattgcctctattgtcttgactggggatacacacatatatgtgtatgtatatgtatgtatatgatgtatatgtatattatatgatgtatatgtatatgtatacgtataattatatgatgtttatgtataaatatggcctaaagacttttaggagaacagttatcttcaggagttccaggttattgtgtctgcttcagcaaaggaagaatttgaagggccatgtgatgcatccccaaagtctctaagtggtgtcctgacagtgttgaataagaaattatctaggagccacattgcagaggcagctctttcaaagcaatgtttatgttcccattttcttttattgaaatagaaaatagtaaaagttatctaaacagtgagaaaggtgggtggtgcgtttgctttgttcaggtcattttgattgactggacctggtgtttaaccccaagattaggcataggtagtgctacttgtgtggcactgctgaaaactcatctttagaaaatgctattcataacattttaaaacttgatcgaaattgagggattgtatttcccttttcccactctgtgtcccctctgttcactcagaatgtcgtgatggtaacttgaggaataagggagcctttgttgaggatgcatgcaggcagctgtgcgttctgttattcatgtgacattcacaaaggacttatattctaagtggctgtattctaacattagaatattaatttctctaaaatatgaaaggtttgaaaacagaagcacaaaatgctcactacacatctctaattccagcagagagattagaataaaaccaagttatttgtccatatcaatatataggaatagcatgtctattttaatgtagctttttatgacacttcagtacataaagttaccgattactttacattattgtaactggagacttcttcagcataaaaatgacatgtcgtgtatacatatatatttattaatctagagtggaaagtggaaaaatctagatgtcttttaaaaaggaatttcacattgatcttagagacattatgatatagatatgagttcttaacactcttggcttttcctcccccccagcatgtgacaatgtggtaatagtgaataaaacctctggcatcttggagagcataaattacccaaatccctacgataaagaccaacgttgtaactggaccatccaagcaacaacaggcaacacggtgaactacacatttctggaatttgatgtggaaaattacgtaaactgctccacagattacttagaggtaagtgtcttgaagctcaataagcaattccatgttcctatccagaaaacaaaactatgctagacatccttcagactcttcaggttcaaatccctagctctgtccggtctgtctgaagtatatcaccatcactgttacgtgaatgggtgtgcttcatgtctctcattgcaccgtttcaatcttaacttaaaattattatcttgttagttacttttatgtctgatctctgtgcataagagaaaatgtttgaatatactcaatacttaattttctaaatattaagtattatttttatattttaaaattcaatttcatttgaaacaattttttcttttgtgaaacagatattttacatgtctatatgtctaacatgtaacatttattcaagtttctttatgcaatcctagtcaataaaagttgctttactattaaatgtggaatttaatagtgaagaaatgtagactatttgataatatgctattttagtcataggagatttcacttgagaaagttgttcttatgatttgcatatgcaacttttaggattatagattttcaaaattaggaagaaatttatttggtttagtttaatattaataatcactcatgtgaatattagtttttattttggtttatattctcatgtatcatatctaagttggcatgtatgtgacatctattttccataattaatgacattgccctttgagtcagctgacatatttcttttatttatctctgtgctggtaacatatgatactactgtgtccccatctgaagtgtagaggacctgctcggactacacaggtcattttttatggtcttccaccaactatgtaacaatggcttagtgtagcattttgaagattattagtaaggatgtagctaaaggtagagtccttgcctaggatgttcaaagtcccatacatgttcaatacatgttgcaaaaaatatgatttgtgttgtttggaaatctaccttgcaatgatttacagcatcaacacatgtcaactaaagccatatccccagggaaaacaacctcttgcacatttccttaactctctttcaccaattttcctaaaagattaatgtgatcacactgttgtctgagatcaccatgccttttctaagtactgaattggctttcaacacaaagaagacagaatatcttgtctttgagagacttttgcttgaagctaagaatataaggatattcttttgttttgggaaaagttctcgtgggttaacaacaataataaaaattatcaaaaactttagcaagtcacggtggtacagatctgtaatctcagggtttaggaggctggggcagtagtattgttagcctgaggccaacctgggaaataaaaagactctgtctcagtgaaaaaagagagcaatcaagcaaacataaaacatcccttcatttatatgtagaagcaacagcatgcagaaatagtattcgcacatcaggaagtgataggtatttgttgccctaagaaactatgatgtgttacacattagatttacaagcataaatttggaatgctctttgttattgctttcatggtttggaaatagagtatcctcttgtagatcaggttagcttcaaacttgctatgtagctgacgttggccttgagaacatgtttttgttgcctccacctcccaaatattggaataataggtgtacatcaccatggctggcttgtcaatggttctagggtcctcttcctctcgagtcaaaagcatgcaggagctcaggaactgcctttcctgtttatataactgaattatacttttcttcacagaggagacttgactcatggtttaaatagcaagttttaccaattagggctctcaacatctcctggactcctgacttctcaaagtaccagctatctgctattaactttggccaggccctcactttccactgagactctgcacaagtctgagaatctgagggtaaaaagtcatagccatatttcagctgtagtctcataatcgctattaattaatgagaaagaactgcatttaatgcaaatctttctgtaaattcctacactttcggtacagtcctacctctttgagcacaaaccacaacctgggacagatgccaagcgttggatacataaaaaactccatgctaagtggataccatggttgggattggagatagtaccgggaggagagcgcataagaagaggaagggactggactggtctttacttgggagaaagaatggggaggaagtgagaggaaacatttccaggaactacatcccacttttttggattggcccgagagtgcaatgctcccaaaaatctcttcaagtcattttgagaggtgtttaaaaactcaattaagaatacttcttccaacggctacaaaacagctcatcagaggccccttgcgatggcgtgcctgtcgtgttccaggcatggcacttgtcttgtgcaatactgatggtgaacgcgtccaagcacagaatgagaaccagaagttcagaaaagacttccaaagaatgacacaattgccagagggaagagatttttttccattgctataagccaagaggcaagagcagagcagagacgcagaggctggtctatgatggaaaatttcaaaacgcaaccatttaaggagaaaaaaaaaaccctgcaggcataaaatttctagcttccattattttaataacttctagttaaatgctgtttttctttcccatttccttcaagtgccctaggcaatttcccaatgagtgacaattactggagccagaaattaattattttgaattaataaaactgaaactataaaaagactggattaggtctatcccacacctcactgggaaacaaacctaccctttaatgttttatcctctggcccaaactaaacccctcaggcttagaactagtgtctcagagcgagtgctggttgcttgtttagggaagctggacattgcctgtgcagctttgtgaagtcagcgtcaaggatttgttctgtttcctaacttgatctcactcttgtcttcatttttgtcctaagtttccacttagaggacatttctactgggtgactgaggatacaggcagaagcaactcttatgtatgaaccctgtggcaggtgttaggtcaacaggagcatatgagtgagaggaagaagccagagaaaggggttgcctcagtgaaacaaagagagggttatggaaggtgaaagagattgccatcagaggggtcaagagagggaggtgaggatggtgaaaattcattggaagataagtgtgaccaaggagggccattgctggggaatagcaggaggcaaatgggtgtggggagacatactggggagaaagcaaagttccactgagttctttgcctcaaaccagtatgtgaggccatggcctctttcctctaaccctcccttttatttccttacctggtgctcatgcagctttcatgggggtgtccttctaatatgtccttttgcatggcagactgtcctaaatgtgaccccaaaagtggatagcacctcccattaaactggacagagctgacttgtatgagagtatattatgttcctggtattatagatagacattatatgatgttccaatcaagttatagcaagacctataatctccaagttgcttcttaggtgagttgttatagctaataagctctgtggcttataaaaatcttattcaattttgatcgtgtagtttttaaaaagtcacaaagggcattattcctagtaagttatattgaaatttgtctggtaatttcttcataccatgttccccctaagtgcatatccattactctttagaatgttattcattatctattatgaatggacatacaacttcttcaaaaataattgattaaaaaaatcacacaggatggcctctgttttaaatattctcacacagtggattttgtttaaatggatctatagttgaatatttagaaaatattgctatttaaatatctaggaaatattaatatagctaatatctactaagcatatattatagctaggtaacacaggaaaacattgtcctcattttacaggtgagaaaagttttgtagatgtggatttctcataggtaagcataatggtactgagagtcaggtgggctgaacactaggcactgtgccttgggccttcacacatcatagatggcatctcacaactttctgccactttcacagaaatcatgagggaatgctcatgggcccctcacatctatgcttatgacattcttgccaagaggcacaggaatgttttaccatggtctcctcatggaaatagtcttctactgtaatcacagtttcttgtatatcctataattccttttagggtctaatttagaattttagctgaaattcatgtcactctcgcctgtttatgaaatgtcaggacagaacttttctatattttgccaattgaaaagacattggtgtgggattgctgctgtgagaggcgtgggccatacaggagaggctgagaacccaggaaaggcccaggagtgaactctgccctttctcttcttgtgaagatcggttgcttctccatggctgtttccgtgtagtcttttctccagaagctccttagagtttctatgcccttgtcgtcacgaacactgaagccatggctgtgcataggacactaacctcaagcacttaatatcaggggttcaatgttttaaaagaagcagcaaaggtgagggaatagcttacttgtgcagggcatgccagtcctcatatatggtgtctgtaagagtggctaaaactcccagcagggtcacagtttcactgtcattctaaaatattttacaacaaccaaactgtcaccaagatgacatgtttttgtttttgtttttttctgtgtgagtagttattgcatgatagagttcactcatttctgaaaagattcaattcaagtaactggcctatctcctgaatggaaattctatgtctctttctccagtttcagaatcaatttctcatcttccttctctgtgtcaaattcttctttagctgaaggtatccaccaccaacttgaaccaacttggtcctcttcttttttctttttgttttgttttgattttgatttttcaatacagggtttctctgtatagtcctggctgtcctggaactcactttgtagaccaggctggcctcgaactcagaaatccacctgcctctgcctcccgaatgatgggattaaaggtttgcgccaccacacccggccagggtcctcttcttaagtcaaccatagctttaaaaattagaaaccttttcctatttacattaaacccaaagtttagctgatttgcacacacactagtaggatagtcagagagccccacaggttgcttccttccttcagaagtttcctccttggtacccttccacatccatgccatttctgattcatagcatgctttactttttaataatctatcttttgtctggaagtttcttttccttttctttttccctccttcagatctttgtttcttgacctatattgagatatatagtcttttgtgtcactttgaaatctgtcacccaaatcataggttgatgactggcatgctcagttgtctcagtccttatagtcagtgtaccacttgacccaatcatttggtcacctccacaacaactgctccttttacagcattacaatgaatccacaatagcacttctcatttctgagaaataaccatggcaataattcaacaaaatctatggttttgtgcaaacatgacatctaacaggggctcacatggttgattggccttccaagtgccatttctgcagattatttgaatgtctccgtgtggtgtcagcatttttcctttgtaaagactgcagtctaggacttagagttggcttggtggttaagaacacttgtggcactagcatgaaggctagagttgttcagatccgataggatacctgtaaatctatggaagaactatatggaagaaagctatggaagatgaaaaacttgctggggcagattatggggttttcttacttccaggttagctaagaaaaatgtgaacctcaggttcaaggagagactctagcaaaaaaaaaaaaaaaaaaaaaaaaaaaaaaaaaaaaagcagagaatgataaaggacaccagatattctctttttaacatttcatgtatgcacagagtacccacacaagtgacatacacacacacacacacacacacacaaacagatatagatagatgattgaactttcaaaaattgtctctaatgatttagaactataacatttaaaactggctattaaatctagctgcagtccaaaatccactagggatctcattagatagagctgactttagtcattactaatggtaatatcttcatttcaaaactctattggtaagttacaagtgttctggtaggtatcttagtgtgtgcctttgtgtacaataaatatttctctttaaaatgaatcttattatcttagtcagggtttctattcctgcacaaaacattatgaccaagaagcaagttgaggaggaaagggtttattcagcttacacttccacattgcttttcatcaccaaaggaagttaggacaggacctcacacagggttggaagttggagacagagtagatgcaaaagccatggaggagtgctccttactggcttgctccccctggcttgctcagcttgcttttttatataatccaagactactaacccagggatggcaccatccacagtggaccctccctccttgagaaaatgccttatagctggatctcatggaagcatttcttctgtgataactccaacttgtgtcaagttgacacacaaaaccaggtagtacacttactttcccatagctacaaggaggagatattctcctgccaacagtttaggagggcccaaattagcattaaaatacaagcagcattaggccaaacccactacaggaatgggtccacccacaatgagctggaccctctcccttcactaaatgaagaaaatacctaataaaaatagatagatagatagatagatagatagatagatagatagatagatagatagatagataaacgaaaatgccttatagccggatcttatggagacattttctcaattgaggttttctccttgcagatgactctagtttgagtcaagtctacattaaactagccagcactctcttccatcctatcctttcctcccttcctgtccttttcccctttcaatttaaggaagtttcaaattcttcctgattatgtcagtgctttctgtcaaatacatttccttccagtgtatacaatctatttcatctcttgccaaatccttactgatgtcatcctactcaccagatgtttatgtcattatatatttcactctcacgtcctctttttaattgcaaaacaaccactatgctacagcgattttcaattacaaaataatgcatttcaaataagaaagggattaacaagcccatcaccaatgtccctgaattctccattttggcaccatactccctgtctgtgtcctaagatatttcccatcccacaactgtggatcacatggtattttaatcacccacagtgctatttgggttttgtgtcaaactcataccacttgctgatgcttcatgcaaattcattgctcagtcacatcagagtcataacacgtattcttagctttccatacagtgattcatgaacacagacaacagggaagtctgttcagggtaaccacattgctatatgccacagaaacaagagctttgagttgtactgaatgagagaaatgctgagataaacacagcttaaggggctagttatttgctttttaaagctatcactagcctacaattcaccatccagacagtagaagatgttttagactcctaaactgtagaaattaactgtatatcattagtttttcatgtcatactagatgaaacagatgctaacgtatcacacaataaagagtctatcgtaggctgcgttatctgtttgagagggctattgatgggtgctctgaaggcatcagacagggaagcaatcaagcttttctgatgaccagagaacacaaacccaaggaagaaggatccccagacatcagagaggttgaggattgacaagagaaagctgactctgcacacctgaagatggattacaaggggcctctagggtatcaataagaaagtcatgaatttcagtgttccttttcagaactgtaagtctctcaagggccagataaaagaaatagcatgatcaaatagatattttcatagtgtaatatttcccttattgaacatgtgtgtgctttttgttttgttttattttggtttgttttggttgagtttttttttttttttttttgaggggggggcagttgttgagccagggttggccgtgaactcctaattcttttgtgttagcctggtgagtgtaatgactgcaggcaagtaccaccatgctgttttcagatctgtatattttaaaaatgattgtggctactcaaataatatggagatccattattgggcttgaggtggaaagcggaggagatggggcaaagccccatattgctgtggagaaataatgttcaaactgaggacttttaagaacattctagaattgctttcttgactcttcttccatccttgcagagagaacttagcattcattcttggacatttgaggaagatgtttttcacccttagtgcagtatccctctcttgaacatgccatctgtgttcctccagctaaccagcagctcagcccagtggcatctgtctcctcccccagcagagagctagaatcctcagcagccccagagctctctgtgggtggcctttgacttccacgtccccttagtccacagatgcagctctgcttaggattttgtcttctctttctctcttggaatctgtttaaagacagaagtttctatccagttaaagtttgttttttcctaacctctccaaaaagggaaatgaaaaaacatgtttgtatttgcacataactgctggtcacatgtccatacaactgcttccatgcagggttcccgaacaatctctcaagatccagaaattctgttgtcagtctaatagtagtcttctttagttctccttgaaaaatatcattggaaatgaaatttcttacttgtgcagttgaggagcccattattagaatcaaatctgttcaaggagggtttaatcaaatcagttgagcctgctgacagctgtggggtggtaagaataaagcttcatgttcctcaaatattccctggctagaagtgacccttaagcatcgggctctattgcagacctgctcagtcctttctatgctgctcagtagagcatgacggtttagaaagaagattctagagccagtaagcctgggtttaaatctaagcttgaataaccatggatgggttgttcagtctctgggtgtcatttccctcagtaaaatggaacaatcaaagtaaatgagctaatacacacaaagaatgagaacagggcctagcacacagcaaacaatgctaactgctgttcgcggtactaatcgaagcagagctcctgagccagccatagggattcatagtgcatccatcctgcaggcggagggaattagtggcccctcgtttagaattcttccttttctttttgctgatgactgcagccagcttcctcgatgcatcttggcaccttgcacaaagtataaatgagaaatgacaacacccatattctagtctactgatttaactgaagctctttgaggaaacagaatggagaggttccattgacacattgaaggtttggaaactgttagtaacggccttaaaaactgctccgtgcttctctataatcctttaacaaagaatgagtatatttgctacaatttaacattttttggcttttagaaagaaaattggggtgaagaaaacaatcagttttctttgcatcattgatgcatttcacaattctgcattaactacacttgcactcacctcagtttgtagagacttcattgcagagttgctaggcattttaacccccagtaatgcccagcataggacacatgcccataaacagtgcattattattctagcatgaatagaatctcccagactaaagagaggcccattggacacgcaaactgtatatgctccagtacaggggaacgccagggccaaaaatatgggaatgggtgggtagggaagtggggggggggagggtatgggggacttttgggatagcattggaaatgtaattgaggaaaatatgtaataaaaaatattaaaaaaaaaagaatctcccagactatggttcagcccctagccttttgcactgtcaaaagctgtatttgggacctggggagttgtttcagttactaagtatttgtcacacaagcaagagcacctgcgttcagactcctgtgtaaaaagctgggtgtgatagtacacctcacatctctgtaaccccagcactgggataggcatgtggaaacaggaggatccctggatctggccagccaacttagtcaaattgggaagaaactttgtcttaaacagagtagagagcaattgaagacatccagtgttgatctttggcctgcacacagcagcattcacatgtgcttagacccacgtgctcaaaaatacacccttcacacataaatacttatgtgtccaccccaaaagccatagtctacaaacattttcccctttatgataacagagttgtacacagagtgtccccatgtgtgaacagcacagctccttccttctgcctctcagccttcttccaaaagccacagagcttctctgtctgaagcctggtaattaaaagctcccttcctggttagaacaaagcagagaagcagaagaggttttgtgtgtgtgagccacagtgggtttgactctttgatcagggcgcgcctccttgctcatttcctgagcagatgagtcatgtttcctggaacagtcctttagaggaagtgggcttccacaacgttagctgtctgctaatagccctgcttacagtagagcacctgccactcacaagtgagtttaagtgcattctataggccagacatttagttttgtctccataccagctgggagaatatagctttctactaggataatccacattcagaattttgaaaagtatagcaatgaagctgatctctcttacgtcattaagcagtccaagatgcatcttagacaagatgttgactccaaaattgtctgggtaaaatgtgatttttttgttttgttttgtttttccagacagggtttctctgtgtagccctggctgtgttctggaactcactctgtagaccatgctggccttgaactcagaaatcctcctgtctctgcctcctaagtgctgggattaaaggtgtgtgccaccacttcccggcgattttttttaaattataaaaatatatgaattctttattttttaggcgatcaaaattcttttcagacagagagtggtggtacacacacacacacacacacacacacacacacacacacatcacagcactttagaggttgaggcaggaggatccatttacaatcagactggctacctaagacccctgtctttgggagaagaaaagaaaatcgttgcccttttctgaccatcctcacgatgaagaattttcaactgactagtttgctatataaaatgatgcagagctgcagccttcaaacaaccagcctttggttcaaaagagctctggtctctgctcctcatagcctctcgaacttgaagcataggattcagatgaataagaacaaaacctaccacaatttcccaaactaccgttaagccacttaaaaatccctttacatgcacaaagtttgacattatttcccacaactttccacctctcttcctcccatacttaagcccaaagcagaaaagtccagaggcatctactatcaatgcttgtgagtacactgcacagggaggaccatgggtgcaggcacactgcaaagagaggaccatgggtacaggcacactgcacagggaggaccatgggtacaggcacactgcaaagggaggaccatgggtgcatgcagactgcacagggaggatcatgcatacaggcacactgcactggtaggaaatgctggtcacaaggttaagttttaaatatcataaatcttagttaggaattctggtttaactttttaaatggggaagatttccaattgcagcattagagacattatatacccacatgcatacacacatgcatgcatacatacatgcatacatacatacatgcatacatacaaacatacatatattagcttttaaagttggcttgcagaataatcactgcattttcatatctatttgatctatattgggggccactgttcacagctcccttctgcttcctttttatacattaaaacatgtgaaaacactttaattttagttcttacttagcaggcttactctttcttctggcaacctggaagaagaggcaggcaaaagcactctaggtctctatggctcaaggttccataattttaatttgttctatgaactaagcttttccatctgcagcagatgctcaggccattggaaggcacaataatatatgtttaaagcatttagtgttttactatgacaggacaattgaaggctatagcctatggaactaaccatatgtatccacaggagagtgtgtttggctctcaaagtctttccctcctccctggggagggacaagttattcactgctccatcaatgatcataaaattcaatatttatagaagtccatggacttctaaagacttcattttaataaagaattagaataattaataatagttaccatgaaaaaggatatgctcaggattaaatggcttgaaaataacgctggaacagattactttctgtaacaacattttaagacaaatgttgatgtttgattctaaacacagaaaagagatatggaaatagcagaacattttagtgggccagctgagtgactggaaacctagaggagtttgtaattctaatatggcaaacattactaagacatatttatgttatgatgtgaatagttctacagagataatgtatttaaaatagacttaactaatcaaaaaagaacacatagtcactgcaggagattgagaaaacatagaaaagcctagaggtaacaaaacaaaaaaaaagttaagttccactgcttccaataatatttagtggtattcattgcctgttctcctttttatgcttattttattttaatattcacagattattccatgcattctaccctgtaatgacatttttctatggagcgtatctattatatgtgttactgtccaagttcacatgtggttgccacattgcagctgctgtgagacagttagcgccctttctagataaacatctttgtaggtaaatgttagcttgcatgcatgtttatgcattgattaaaaaaataaataaaacaaagcacaacaaaaaataatctaaatcagcctttgtgccttctgatataagtgatccatagaaagcagtacttaaaaccatacaggcaacaagagcagactgagagcagccagtccacagagaggccactaagccatctggattggagataaacctctaattcaaagtggtacaaaataactcagggtaactcagaatgtggtcatctgctggtttgccactcacatgcaaaccctggcattatgagtaaccgttgactttagatgggcagttcacatgccctgctccaccctgatagcacgtggcattgtggcttttcctgtagtgaggacgtgtgtgggagtccccgatgccagtgtgccaggagtgagtggctgcatgtttagtggggagaggcaccaaggccccacagagccatggtggagcactgtcgcatgtgtatcacacattctcaaccttcagcaatatttggctcctttactttctgcagttcaacaacagattctgcaagccctgggctttttcctgttcctaatgacaactgtgtatcagtattctactctacaattctaatttggcagaattgcagaaacattccaaaacctttaaattttaaagtgacctataaaggtcacgcttaccaagatagtgtatgtaaaacttaacaacatccataaggattgcttttgtgcttggggtgaactcagaggtggtgtaccttcccagcctacacaataccatggcttcatctacagccctggaaagataatgagtcagtgccataggcattctgcagttgtggttttcgggggaggaataaacaggtgtttcaagaattcagcacctcctgccctcttgagttccagggcataagcagcaggagccacagcatggaaggacagtgagaagcaaggccactaaactaaggaaaagcatatccccttctgctcatccaggcccttctcatctcatcatgctagcctcagcaccttctggtgtcctctctcttatgctgtcctctgtcatgatggaccacacttcttcacctcccacacatagacttaatttccctcccctcactaagggtgatttgcatctggctctcacccagaatgtgaggaatggctgcagtcacaactcaaaccaaggttaccacagcaacgggatgcaagtaagcaagcaagggcactccatctccaggcttgagtcacttcttccctgcctgctcaaccagtgatcattctgtaaagagttaaacatgagtcagactcagctgtctagactcatatttcattgcacaaagctacttctgggtggtttctttagtgaaaaaaaaaaaaagtagtgttccctttatatcagaccaaaagttaaaagaacttttcaaacacgctctaccttgtctccatgtagttttctcatttgccacaaggctgtaagtgccaagtgataccaaaattacgtattcataaagagttcagattcaaaaagttaagtaacttctacaagactgtgtgctaagcccaactctacccacacaagaaatgccttgacaagaaaatgacttggttgctcttccatcattgacacttgacttcaaagagcccatccaagaactcctgcccagggtcttaatcagcttcattttattgactacagtttcactttttaataaagataggggaatctttgctgtaccttaagggtttaagttttacttatttatttatttatttatttatttatttatttatttatttatttatttatttattatatgtaagtacactgtagctgtcttcagacacaccagaagagggcgtcaaatcttgttatggatggttgtgagccaccatgtggttgctgggatttgaactccggacctttggaagagcagtcgggtcctcttacccattgagccatctcaccagcccaggtttaagttaagttatttcagtcacataaaaaaaaaaagagttgaagtagtattccttggaagtttccaagcattctatatataataggatgtaatgaaaaattcctgtgtttaatggcatcatacaagaaaggcttaatttgccttccatgtcttatgactgaccttctgtgattgagaaaatgaggtttacttctagacatgcttcaagaacagaaaaacaatactttggattgtggttgtagctcagtggtgcctacagtaggtgcctagcagtggtaagattctaggtttgaactccagaatcaaaaaagaaaaaattgaaaagggtttagtaaagggacaacctgctggggcccaagtcagaaaacatgttacacaaggctctgctcactaagactctgatttccagtgatgcaaaggagcccacctagctttttggttggttaattgtttttttttttttcttttttctttttttttttttaataaagacagggtgtctcgacatagccctggctgtcctggaactcaggctaatctcagactcatagagatccacctacctctgcctcctgagtgctaggattaaaggtgtgttccacggtgtctaaatgccagcatactttaatctccagggctagagagatggtttagcaagtgaaagcacttgtgatgcaagactgggagtttgtgtttgattcctagatactgtggtaaaggggagaattaattcttgaacattatcctctgacttctagatatgcacgtatacatacaggaccccataacacatatattaaccattaacacatataaacatacaatggtacaaattaaaaacaaacaaaacaaaaccaaacctatctcactgggccagtgagaaggctcagcagataaaaagcacttgctgtgcatacctggtgagctgagttcaatccccagaacccacatggtagaaagagaaaacacattgctgggaattgttttctgacttccacacacatgcataaccttgcataccttgcatacctacacaaatatcataatcaaacacactaagaataacagacaaacagaactgttaatatcacaataattgggccttctctgtcagttgctaacatactgcatgtgtctttaattttatatcatctgcttttggggggcccttaatattgagaggggcctatgaattgtttcatattgtaattgaaatctgaagttactatggtttctgtgtttgtaccagattgtcaaacacacaggatgtaaccaagcagcccagcattttaggaagtgtagcctggacaataaactccttccctgtgtgtcctgataagggctgagatgtttttgttagggtgagggtgagggacacttgaattacaaacatcacacatgaattgtgttcctaagagtcaaactgactagactgaacacaaaaggccttatgatacacagtatcacatttgaaatgatggccaacatggcaaagtgagaatcatttcaagtattttatttttaaaaagacctgcagtgacacaaactagaattcatattcaaggtgataaaatctcatctgtaggttcttgtttctttaagagcgttcagaacttctcgatggttctgtggagtagatctcaggcttgctgaaagcagaagaaatcatagttttaccagattcaaaccagcaagctttctggtcatgcctatgagtcacagctggaatgtcctgtggttaacattctgtcttgaaaacagaatcaagaccagcaagccactgctggtttctatggtgactggtaagccaccgctggtttctatggtgactgttactttttgcatggtgagtttactcgggaatgaactgtggaggtgcattagccatccgtgtgagaagttaaacaaacaaaaaatgtgatttaattaaatataaatgttaaaagcacataaaactgaaggagctgggtggatggtcctccccctctctagtagaagtattggtgtgaagtaattaattcgttaatttatttcacattgtatttaagtattttcaaatatgtctacttggtgtttattgtaatgcatcattccattctttccaaaggataacaacatttagttatcatttatcagtgtttccacaaacccatcttccttgtctatctacctggcccagtcccacacacaatgtaccaccactggcttctggcatttaggggctcttctttagtgtagaagatcccattagaaggaagaaaatataccatctacatcatttaaaattccacagctcttaaccttgttgagctggagagaaaaagaatgcgctataatgtattataatatataatgacctgtgtagaatcaactatggtccccagctccctgctacccactgcgtacgacaatccaccaggtagagggtgcttatggccacaaaaatgtttaccttaagttttgcaagttaaagaccaagtaatttcagctttggtcactaaatcacaacccaaagttagaatctcttgggtttaaagactgtaggctgaaagacttgcttattaagtcagtatgtggtgacagtatatttatttttgtatttagtttcaaagtagacttcacgcaataaaattgatgaaaaccttgaaacagagataaacactctgctgttagacagtgattcaggagcattcctagtacagcctgggagcactcacagcacattctgggagtacttacggcatagcctggcttcattttgcacctacctccagcttaagaaggtgatagaacccaagactcaagggaagggctttggctcttgtctcttctgattttcttattctcttccttccttccttccttccttccgtccttccttccttccttccttccttccgtccttccttccttccttccgtcctcctccctctccctctctctctccctctatctctctctctttctttctttcctcttcttttttcattctattgccttttcctggcttctgtcagcacatagtgttatcagactttttattactgcaacaaaacaccatgttcaaaagcaactcaagatggaaagggccattttaagtctacagttccacatcacagtccatcattgaggaaaatcaagggtggaaccgggaggcaggaacaggaagtcacaaaggaatgttgcttattggcttgctttccatggctttcttgtcctgcttcctaatagtacccaggaccactggcctaggtgttgcactgcccactgtgagctggccccttcccacatcactcattaatgaagataatgctccatgggtttacccagaagccaatctggtaagggcagttttagatttagaatccatcttcccaattgtctccaggttgtgtgaagttgaggttaaactagacagtgcatgtagtatgctaggaacctgacaagaaatacaggtagttaagcaagagtgtttacaacacaaatacaggtagttaagcaagagtgtttacaacacaaaaccaagagaggtaaggtaataaacctgggaacgaactctatcatgatccatttatttaaaaatcatggatttagtaccaaacagtgaacagcttattgaactctgcttctcattttaagcctctgatgatcaccccacagtaggatgaacaactgcttgagaatttgatgaggcaggtcatcattcagaaatctgagatttattatgagcttgaacaagacaacaactaggttcccacattacaggatgaccacaaagtgattcaaaccctttactgcaggaaattattagactgatacttacagttgtatgattcaaattcttatctaactatacaaaagtagtaaaacagattaagtctttaaagaatatcacattcgtggaagataccaaaatgtccattcactggatagctactggaattcttcccttagagtgttctgcttttaacagagaagaacaggaaatccaggagtggcctgtgcccttaggaaagtcgaagtcataggggtaagagaatgttgtgtgaatcaccaagaagggaggcgatgtggcagactgcctagcagcacaactgaagagctaagaattcactaggcatggtggctcaaccctccagaccgagcatatgagaagctgaggcaggtaaattgctacaaggttaagccacactacattgtgatttttcaagcctgcttaggctacagagtgagaccctgtcccaaaacaaaccaaagtaaagcccaaagggacatagtggcttattcaaaggttaaaaacctcacatctaatcattataattaggaaagagtccacagacgtactttgcaaaatctggttataagatttttatagctgagtttaaagcacattatatcacattttagtacataaaagaacttaccagtttgaaaatcactgactccatatgatgcatgtattcacagatgtatagaatgtacagccactaaacagtgagcaaaaaagccaagggtggtagaatgatgggcagcttggtgagcacaggagaggggaaaagccacacgggggcaaaatagcctgagaagaagaagaacagtcagaggctaggcctttaatcccagcaaaagaacagtcagaagctaggccttcaatcccagcagttgggagttagagacaggcagatctctgagtgaaaagccagcctggtctacagaatgagttccaggacagccaaggctacatggagagattctcaaacataataagatgaaacaaacaaaacaaaacaaaaccaaagacaaccacaagaaaaaacaatagtccaggaagcctatgtgcatattttccaatacttcccgttttgttattgcaggcagctcattctaaagtaactgggatcaagtgatataggtagactgcagggggtttcagaggtaatctgatggcccaccacatgaggaggccacattttgggtcatccttttttcctacgtgaaaagagaaagattcttttccagaatagcaaacaaacaaatgtacacacacaaacaaaaaatatgtgtcgtgctttacttaggggaatttctctttaatttcagctctatgatggaccacaacggataggacgctactgtggagaaaatatccccccaccaggagctacaacaggttccaaacttattgtagtgttccatacagatggggttgactctggagagaaaggatttaagatgcactggttcatccatggtaagccactcattgatctccgttgtattaataattgttatttggccaaaaagtatttctttaccaactccttccttggaaacagtggcatcaacaaataatgaaagcaaattagtaacctagagctaggctatagataacttactgagatgtctgtggaattccaggagataaattttgctggagttctgagaaaaaacaaagttaaagtagaagagatttgagtaactgcttgagcaggtggagtgataatctgccttagagtagacacattacatacatggtggtgacatgtgagagtcccaggtgccatagaacagaaagggacataaggctcaccttgacatttgtcagagaaggaatgaccaggacaatataaagaatgggagtcagaaaggtcaaagaggaaaaaaaggactggggtgagagaaatagtggaaacagatcatttgaactggatgcaagaattgaggattgtgtcttgtatctgctaaacagactagggacatactgaagactatctacaaaccactgtttaaggcacagatagaaataattactttcctaaaactcattattaattagagtcatgagacttcaaaattcatctcctgagggtcagtctataggttgacggaacctgcacaatggtttttaaaatgcagctgccagtaacagcaggagcacaggaacttttcagaaatgcgaattcttagcccctaccctacatccacagtagttctcaaccagtgagacatggtgttaggactcatggtgaatgtcagtaaattgaggagagatagagttgcactggtataccagaaatctcacagatacctaaactgcaaccctcctgttaaaaatcagtggtaaaggctggtgagatgtctcagttggtaaagtgcttgccttacaaccatgagaatctagttaaatcactgaacccaagccacacccagtaatatgctcctataaagccagcattgaaaagatgggaggtgaggccgaccagaaccttggtgctcgctgaccagctaggctatctgatttgtcagagttctagatcaacgagaaactttgccttaaacaagaggtgggaaatccctaaggaccaatactcaagattgctctcaaagccctacctacagatgcacagtgcatatatgtcccaggcatgagcatgcacatgtaaatgcacacaaaaacagagaaacacagagagaatgcagtgtgagttgcgtgtgtgtgtgtgtgtgtgtgtgtgtgtgcgtgtgtgtgtgtgtgtacatgagaggggagagagagggaagaggggagagaggaaagaggagagaggagagatgagggggagagaggagaggggagagagagacagagagaacatgaatcagaggtacataagcaagcacatttgaaacttgagatttattggcattacaaccctcccatgtaaatctcagaactgccaaatagaattgtcaattgtagatcctttatttatcaagatgaaggcttttctatttgtgatacagttttatataccaacaaacccactataacttgaaaatatctagaatcatgtcatgtgtctaacttaacaaatatcattactagcctaacctactttaaacattctctaaaacacctagataacctacaattggtaaactcattgaacataaggccaatttataaagtagcaaaaagtatttcatatgaaattaaaaaattacaaatatgttttctcttgattgcttatcacattcaatcatctgaaggtaagaagtgtctttctctgtaagaacgttagatgctcttctgatatgatttttttgttaaaatctaaatgtagacttctccatatttaagtactagtggcaatacactgggctactggtaacttgaaatacatatgatgattctcaatagtaaatgagacatgtggtcaatcttgcagagttcctggatgttcttcttcatcacgtgagttttacacttacagtggttactttattaattgacctaattaaaggatttagttgatttctctccccagtatattatgtttccagtgttctgttgttcaacaatattttgattctaagtaatctagagatggtctgaaaagacagagagcaaacaggaaaaatttgaaaaatagcccagactatcaatgcctgggaatactcctgagaacagtgtttgtcagttgtttatattcacagaacagctaaggttctccttatcttgtatttagttttgcaatgcctagaactcaaaaccaggaccccacacatgctaggcaagtactctaatgatgagttatatccttagccctcactggcaaatcttgtaaatatggagtagtgaggcacacccactggaatttctaagactatctctggacgataaggttgctattacacgtaactcagttttaggagcaaggcaaaatggcattgcatttggtcaagtaaaatggtagaaagacagaattctgagattccagagaatcctgctaaggagttcaaatcacatatgatcctaagtaagtttaaatggcaccagatggcagccaggttcctgaaggaaacaacgttctgcttcaaagatttaaagggcctaagcatgggaagtgtcttgggccaaaggcctcagaatgtggtcctcagtcctaggtatacataggaattgtctaggagtttaagcacaagagaaccctgagagatagaattctattggtcatgtttggccattgccactttaggtcccgtcctaagcgatgcagcctgcagtcagggtggaagaatgaagagatgctggcggtacttttgctagctgatctctttattcaagaagctgctcaccctcccctccaggctgttccagccgttctggctagagcttgcttgatgggatggtcatcactggcgacactcaacttactggataactaactgggttcttctagccaacatgccaaaccctctgttgaaagctctaaggttttgttgagccaaaatttttctttcacttatttttggaatatgtcttctttcaagagagtcaaagacaccctctgtctattctcttttcctgtttaccattgcaaaattttcccccgtttgctgaaaatttgctaagttcagagccagagttatgtaacaatattttactaattaggacaaaacttaaaaaacaattttgactctgtactgtccactgtatgtagatgctatttgacaataatcttctggaaggagatcatgggcagtaaaatcaatacaaaatgaactgctatggcatgtcatcatcatgctgcattagtacatcttatgttctatatctgacctatgtaacttgggatgacttgagaagaggaggagttaacagagtaaacatcaggcagaaagtcttcactgagaatggtaccttgattagttattagaggaaaactcaagactaagctgtcattcttctgtttattaaagctataggtttaatgtttctatactagataccatgctatgtatgactagggatactgaaatggcttagttcccacatccactgcaataaagggaaggcaatcagcatgcaaataaatatgcacaatcaaatcttattagggacgagggaacacacagaaagagattggataagattggagcaggcagggaagtcgtctatgaaattgcaacctctgaactaacacctgaaaattaagtaagtgctatttggccaaataggagaagagaaaggaaagaccccatgatacaaagaatcggggagcaagagattcaagaccaaaagctaaatttctagaggaaactagtaagtccagcagcaactaccacaactggcttcatgagacacaaactcaattcatagtggtcacagtgtcttcctctctgcaagtcctttatacttcatgcaaacaggtctggggtaggatgcccaaggatggagaagcacgataaattgtgggtcttaaaatacaggatgcaatacaaaatacacactaaacagagttatgactcactaaacaacagggtcatgtttcaagcaatgccttgttgttagcccatttcatcattgtgagcataacggagaattcccacacgtactaagattgctacaaggtcacctgctaatctgtggggctgcccaggtttgtggtgcccatccatgactgagcttcattctgcagcatgtgactctcagtctccctatgcagaactgatattgaagccctctcccctctggctcctttccacatgatgctataagaactcagcaaacgcttgctagcagagcctggacttgacaatgatgtcatatcctgagcactgtggctcaggagcccctacacacttcattcattttgctcagtgataaataaatccgtttacccagtgtgcctttttgtcaacagcacagatcttctctttacttggagaaaatggatctacaagtgagctttctccgtgggtccattttgtagatgcaaaataaagcccacactgcagtgcctttatgcagatcttcaaagagaatcccaccctggaaataaggaaatggccacagtcgctctgcccagctaatcagttcacaggattcagcattgacatgacagtattgttcagaagctgaattctatcctgggagccttggtctgggctgctgaagggtatatagaacttctcataaattgtgtgaataggagcctcccagccagctgcacacacccctcctccctttccctccggctccttccagcctcctctcacttggcagtggactatagcatgcaaacaaggtcaaggagctttgtgggcagagagtgacatttgcaaaggcagcgggcacttcagctagggacccagcaggggaagagctaaatggcatgtgatcaggaggtgatgtcaccatggacttccacaaaggaaagtgtggccttttctttggggagatagatgacatcatcctcccagatgggggccaccccattctcttttctttttagttgttaatgagatttctgcgactctagactctagggttttaaaagtttgtttgtaagaacattttaaaacatttttaagaccttctatgagtgactgggttcaaaagataatgcctttctagctaactggactttcagcccccgcaccaagggcttctcaaatgttcactttcggaatgctggccaggagcttatacagtgtcaagcctcattccagatcttgggggcagtcaatagtgtgtggctactattggtctttctggggaggttcttctaatttgacacttttatttgtttttgtgactttgagttgtaagcttgggtttctgtaagcactcaagtttttaatactgtccgtttcttagggaattggcagggtagatgcagagggacagctcacagcatctatgatccctgtcttaaaaagaaaacttcttatttaaattatatagataacaagcatcgtggcatagtacaggcacatgcagtgcccaggaaatatctcagtatcaaatgctatgaataaaaaattagaagatatcttgaaaggctctgtaggaagccagctgatagtaaacaaaaggtttaaaaacactaagcaaagcatgtgatagaaattaagtcacggctggctgtccaactgataaaagacaaatgcaaaaaaggctaatagtttttcctgtcaccagggaaaaaccatagatagattttttttctctgtttctagggatggatctcaagggatttgggtgcagagcaagccctccatgactctgctacattacatccccagtccccagagatggatttttattttgagctataggactctagatatataaggtaatgcagtgccttgcacagagggacattttgtagtaatagcataggtactggggctatcttttacaggcacacagaaacaatgatctgaaggcaccatcgaagaaatagttcagcaattaagagcactggctgctcttgcagaggacctaggttcagttcccagcacccattggcatggtacaacaatctataactacacgtccagttgatccagtgctctctggcctctgtaggtgccaggcctacacatgatacacagacattcctacaggcaaaacacatacacataaatttaaaaataaaaccacacatgcatatacatacacataggcacgaatacacagaaatgcacacaatgaaacagggacagagctagagtgacttgttggtgatacagacagcactataacaaattctaacacagaaatgctacattttcttttcctggtactttctccaaagttacagtgtggaaatcatattatttaggttttcatatttgaatattattttgagagctttataattatttcatgatcactcttttgggtctgtctcgagccatatttcttcatggtgtttacaacgaaagcaatttcatgaactgtggtcaggaaagatccaatcaataaaactggcctatgtatcacctgctccgggagagccctacctctcagatggtgatggacttactcttagggtggcacttcctgttaagctgtgacattgcagagaggagcgcacacaggagctcctctgcctctaaagggccctcagtcatgaacaaggtgcaactcgcgcatgcaccaaacctgtaagcaagtcattggaaaagatgaaagaaaagatggagtcctgccactgttttatgattatagtatgacataaattctgtttggtttggacagagatttaaggaaatttgaagcagaaaccactagttgtgttcaagcacaaaagtagctgtttaacagctcactaagtctcccctcagacttttgcatactgtacacataaatgcgtgtttctattttgcccactttgatattttggacttctgtgtttgtgctacttgaaaacatttttagggatgaagattagaaatgaatactgctttagtatggagataagttcaaagttttgattatgatcctgtaactgacttgatttttggcaaattctcagttgtagctttgttctgaatgaatgatgctaatttaaaaaaaaatctgtttacccaggcagataacagtgcctgcctctatttccagatgttaagggggccaagcaagagactcacttgatcatgggtttgagattagcctgagcaatatagagtgaccttgtctcaaaaacaaagaaatctgtttgccaataatcctgctgttggaataattttctcaaaaacagttttgtagctcattttgcctcaggctcaagagttttcatggcaagttctgtgagcaaatgcaacggagagcatgtgcagatctttcacaagacacggaaaagggagacctctattttatttacatttgttttttgcctccttgacaacaacagtaaatacacatacacacacacccataaagttgaccttcacttagcattggctctacgtatgtggccagagcctttgggaccttatgtcccaattcccacattgccactgtttgaaaccctctgagggcaatttcagtgctatttccactgttgctctttcaaaccgttataaaatggggcaggggggggataaccctcaaagaataatgaccttccaaaatcatatattgcacaatttaaaatagtccttgatttggggccaaagggagagttttctcaaatcttctgtttgtgttctggtttcctagcaaccacttccctgatagaaattgcacattctttccaggagattccttgctttttcacacaatgtgaaaagggaagtgatcggctatttctttctgacaattgtaacaaacacaaatggccagactcacacaggacagtcatcatgttcagtatgaacattaatcttttctgtctcttaactcttacctatctccagattagttttatttgattgctgctgtgagctcagcaaacatgtcaccttcctctcaccaagtaggcagaatgatactaatgaagttagtagaattatattctgcatatatataatgagtgatacaaaatcattttatgctttttcttttcattatatagactaaacaatgtaagtttttatcacctaagaataattttaactctgtctttaggaattttttaaacattttatttactcatagtattcatttatttatatgtatagtgtgtaggtgtgcataccatatatgcatgtggaggtcagaggtcaacttgtagcaggcatctctctgcttccatcttgttagctgtcagcaaacctttagctggtaagtcacctctctgccaggaaatcggcctcaggtcattaattctgacaaaacaaattacattggcctgtgaaaattgaattaaaatatgattatgattaatatttaatgtaccgaccttactgacattacttattatcactcttgatgttgttatttaaaaaataataatttcactgtactgggtactttaaaatattatctcctatgtcactctaatacttctgtgaaagaagcaacattgtctctttgtagataaaaatggctgagaagggcaccttcaagacactaagtgactaactcagactcagaagttcagagaccatgggattggcccagaggaacctttggtgtcagaccccaaagtctgggctttaagtcgtggcctgctgtctgaaatcagcagtttctctcacaagtttcactgtgaaaaggtggcatctcactgtggtctgaagaagtcctaagcttgcagtagctaattttataaatgaactccaataaacatttaaaagaaatctatagaatctttcccatgtaagttatgttcttgtttcaagagctccacaaaaatttacaccattcattcattcattcattcactcattcactcattctttcttcagtcaaagtagcaataaactgaagtcctgcggtgaggtctgagcacattgtcagaggtctagcacacaatagctcatgtttgttcgccattctgcatgatgtctgcctttctttctgttcattgagcacactcatgcttgctaagcctgtgccctaccatggagctttgatacggtcctctcctcatccatttacataaagttcttctggagttaccacacgtagtcaatggaattaattcatctgggaaaaaaacacagggttagctactctgttactcaggctcagctccagaaagtagcttacaaggaggagtgaggttataatgccaggggcaggctagctgtcttcagaggagattggatggctcagcataggcactgagggtggggtggagtgtgtgaggacttagctgatgtagttgttctgcttcagtttcgagaaacccaggctggctggcttgctgactgcaaccctggatatattactaacagaaaatgatcttggaatcatctgtccctgtaaccacggtctctgctgccatctttacatggccttcccagttctgtgtgtctgtctccaaattttccctcttagaggatgtcttgaacttcattccaactgtaaggcagcagcctctgcttgactctccttgaattgataacgtctgtggttatatcaacaccatcagcatggtgctgctcgtttttgtgcatttttgggtgtggagcaaccttcctgtggagaaaagcttgggaactgagggcagagtacacagcagaatcagagagaacagggtgaggcagagcctctgaggctccctgagcctcaccctggaaaaagttatcttagataatgacatagttttcaaatcttctatttgaagatttgaaaactttcaaatagaaatgtaaatgttggacttgcgaatgcctgagggcatgatcccgttatctttgcctgttagtagggttttatgaagcatcagtagtcttaggtacaacctcttactttgaaagatatttctcctattttattaattttatttcctttgaagatatcttatactacactttgtttagaaatctttaataatttcaaaacaccctgagagacagaggtgatagatgatagagagatagaatgactataattaatgaattgacttatcctggagaactgtaagggaagaatttctactgggaaaacattctgaatctaagaagaaattcaaaatagaaaaagtagattcgaaggaactgggtacagtgcatctcagcgaaagtgttgagaccggatatgcttctctgggttaaaatgaaagatgtctatcctttatgtataggaaattaaatttaatataaagtgtggccatcctgatttatctctttttatctggggtgctcaggtgaagaactttaatattcatatccaggtcatctcagatagttagaggctgtggctgccttaatcttatacagtcgtatgataacttgcatagtcattcctataattttatagctataggtaccactgattttgcacttctgatatttttttttgttcaagtaacatacttcataataagggtttgtttgttttgcattttggcctatacaattaaaaacaggcaatttcactccatatggctatatagaaatcaattaaaatttattatcagaaagtgtggagtagagataaagtccccatggaagatgaaactgtctaatccttcatgatttcttaagtcttaaaaaaaaaagtcactcttttaacgtggtactagacccagagtctgttgctggttttctcaatgatcttttctatttctaaccgcattcttctctaaccatcatctaatgttcaaggtgataaataagaagaggttagtacaacatgcagtacttcttgctgtgtgattctagagctgctgcctccttatgcctgcctgggagcttgtctgcctcagttatgagcaaaagaatgagctgtactagcataaagccattgtaataacgtacccagaacaggcggcttaagacagcaggaatgtattactttgctcaagaaggcactgatcgaaagtcaagaccattgcatcaagcagagccctggggaagaatgaaccttcctgcctctcccaactcctgttgtgcactggaaagtgctggggtttgtgcctgatagcagctgcaacctcaacttctgcctctctctttacccaggagcctttcctcggtgtcaggctcacattctctcttctcaggagagatttcagtctcatgctaacccagtagctgttccttgacctgataatgttgcagagacctgcctgtcacattttcaggttcctggcagacatgacattgggaaatgactccactcattccagagtgttctgtactgtgactttgaacaactctttttcactctggctttgttcggttttcttgttcctgtcttcttgtttcctccttttccttaggagaatgtcacatttcttgcctttgaagccaaggcaaagacaaagtctcccaaatttgtcaggactgacttgaacttcagaatttgcagattgattttctagggaatacttgcgggctagcatttttctgtgagaacaaggacatgagcttcaatgatcatggaatgaggtaaaacaagaagaccagaaaataggttagctggccgtgacttggagtttccctcacttcccagcttttcagccctcgttcccatcaaacctaccctgccaagagcagagctccactcccagacctccccagccctttccagctctgcttttccttccttgctggctgttgcttgcctacttctaaggataacgtaaagatctgttcatgaaagggctcttctaatgttgtttctgttctgacacacccacgagttttaaaattcctacagaaaataaaatcaggctcctctgtgtatcctctgccttcaggattttgtgcttgtgtgttttaaataaaaacaagtttcaataacacaaaacagagaggaaatagacaactgtaggcacaggcactaagaagcctttttatgtgatagaagaaaactggcctaaccaatgagctcattgtaagatattacggaacaaagggtatgagttttcagttcatagaaagactattataatataaatcaatattcagttgagtatgtgagcctccccattttgttgtatttaacatttgtttttattgtagttactgattttactgtatgttggctcttgggctttgaacaatgactcctggaagcagagagcaggatgtgaggataccctggaagctggctttgtagctcctttcctccagtattagtggatcttagccttatttattccacacaggcacctctcctgaaaaatcacctttcagattacagtgttaggaaaacagaaaaaaaaaaaaaaatgaagagctgacaccttgagtgacctcggggcacaggaggataaactgaaccaccttgcccctgattataattgtcttaaagaaagaactcacagaagacctgtgctatagttctgtgctgcgatttaaaaattcatagcttgttttagacaaaacaaaaccagtattagctgagttcttacttgagcaaaattttaaattatctatctcaataaacagactaagcaacggctttcaactctttcttgttcagagcactgtagagcagtgtgcttcctgctgataagggaaacacttcctttcagctgatgacgaggatttggagggaaataaaaccaaatagattatcagtcctgggaaaggttttataaagatcaactgcttaaaactgggaaaacatgtgagtcacttcaaagcactactgtagtccagtttggctacactagacaccaacacactagacagtgtcagatttgcctcaaagtcgatacaaagattttgctctgcttcctttacccaggttgctggggtaattctgtgtttagacagtgaacagagcagctgagaggataagacaccgtcaggcaggtacagccaccaagtttgatagagacagcacagaactagaaatgaagaggggctaggctgtatctgactaactggattttctctagaggaattcactaagagacttgggctcacagatcatctctaaagtgagccccataccttcatgcctaactcgtgttgttaggaatttcaagcaatatactgtgcttattaaaagcatttgagaactaaactgccgtatacatggaactgtttttaaaagcttacaacttaatgaataattttgtatcttttttttttctattgctagctaaatttttagccaataattctactcctagctccaaggtttatttgtgtgtgtgtgtgtgtgtgtgtgtgtgtgtgtgtgtgtgtgtgtgtgtgtatgtgtagtgtagtgtacttttatatctagataaacttttgctaagagacagtacatagtacaagcagagcaattatcccatcattcccaaaaatcttattttgactcttttattaacctatataacaactctgagcactggagtttggaacctgatattatcaccccagagtacagtaacaggttggggtgttagcttcctgttatgtgcaaaggaatttacaaggaaacctaaaaacattaggagacacaatggggaaaaagtgatacagagccttagatgagtcaactatgattttggattcaattagctgataggctgaacctaaataaatacgcagagatgtgttacccaagctccttccctccttctctctaagggctttcacatttggttatcaagcactttagcatgtaaacagaatggcttcacttacttgtaatttagaggaaagttccatgtttgaacataacacaggttcctgggctgcccaggctcaggcagtaccagtttctggagtaagtagactgtgagtggtgtccctagagctcagcagaggttccgaggaattgtaccagctacactgcttttcggcttcagggatattttcagtgtggttttacagttggaaaagtgttacctaatctttgatggcacttattgttatataccattctccacagtctataaataatattagtatgtttgcttttacatagtgattttcaaaatggcacacacaccactccctccttgacataaaaggagaaacactatatgacatgggaaaagtctggaaacacaagtttcaggacaaagtaggagagaagcacgagaagaaggtggtagcactcagaactttgagccagaatcaagggctttggccttcttcttctctcccttttcccctctttccctctctctctctctctctctctctctctctctctctctctctctctctctccccccccacctctctctctctctctctcccccacctctctctccccctctccccctgcctgcctccttttcctctctcccctccctcccaagacaatctcagctagtacaggctgggctctcaaccttcctatgtaaccaaggataaccttgtcctgatgatcatgacactgtctccatttcccctgctaggattgcagatgtgcatcaccatgcctggctagcattgtgttctttatagattggaaattctcctattaggttctattaggacccccactcccagaattcactgtgttcctcttaggtctagatgtgtaggaataagaactcagcattatataaataatgtaatattgtttatctaaaatgaataaatttaataatgatttccctctcttgccctctctgctagggcttaaagcctaggtcttatatatcataagcatgcgttctacaatttactttatctcatgaccctcttactgctttataatggcaacattaaacttttgcacaacatctctcctataggagccatagttctttgccacctttggtgagcagaaggtttgaatacattctggcttctatggtcactttgtgctaacagattgtttttacttgacaggctgtggtggagagatgtctggaaccatgggctcctttagcagccctgggtaccctaacagctatcctcataacaaggagtgtatctggaacattcgcgtggccccagggaatagcattcagctcaccatccatgactttgatgtggaatatcatgcaagctgcaagtatgacaccctggaggtaggaagtctgattgttctccagtgtatcacaaaatcttgggtagaactagagagatccccatcttctttcctgtggctagtcctgttctatgcttaggcattctagcaagtatcctcctctatgaatggattgtgttagtagaataagggattaatatagcagtttggtttctctcctagtggctagtaacagttcactaggaggtaaggccaggtagcagcaattgggtgtcaatatgagcaaagaacagggaagggtccccagtgggcaggcttggttctgtctcttttccggatggataggaagctgagccatcagttccctctcttcttttcctgttgataaaatctgtgcttgggctctttaacagcccacacttctccttctggtccgaggaatcttccttagagaaagcattctgcatttgggagtcagtggaagaggggccccagcacactgactgcaagtgccactgacccctttacagcagcaaatgctgcctgggctgtgggatggtcaggatgctacagctatagttgctgcagagggctggttttgttttgttatttgcttttgttggttttgttttgttatttgttgttgttattccttagtgtggtctttatctacaaaaccttttcaaggctaccttaagagtttatctcacaaaattaaggtagccattttgaactttaggccttaaagtttattataatcaacttggacctatcagcaaaattaaatggtttctaaacacacacaagttccccatctgttagtgttagggactactattccatataactctacagctagtgtgtgacacagagtaagcacctgacgcctgtgagcgagcaaaagcattcaaacccctgactgatacatggtaataaggcacatacggtccatgatgattgcacacagccacattctcacttggaggtgaacagtcccatgtaagagtaggatgctgtctgtccacatattacagttgtcaaaatcaagtctcacattcatggcctttttaaatgaccaccgggatggttgctgatatgggcttggatggcattgacccaaatttccagtttcatgtgtcccagggcaaagaagttagccacatacgtagacatagaaagagttattaagaaagggaaatgagagcgggctgagggaaaagcatattcttgaaagtgctgggcccagggctcatcaccttcgtaggtcatgggcacaacccaagcctctcccactcgtggataccctagggtttacctaggatgcccttctctatacagctaggaagggaagcatttcaaggctttctctgccagctgacttcttccatatgctaatcttcatatagttttctccagcaagcactctcctccataaatggaaggcctatagaacgaacctggtcacctttctctcctctgcccagataaaataaggcatttcagaggattgaaaacagtagagagtactttatggaaaactttaatccttaaaaattatgtgatatgaagaaacagagttcttaagcaatctgtcccctaatgataggtatactcactaggaattatattcagcaccccagttccctctgcaaggagacagtgccttctcagtgacagtcctgctactatgtgatgcctccatcttacaggaggaatggggtttaggaaagaacaaggcaccttccaaaattcaccctcatagcttgaagaaagaccaccaacactaacccgtgagatgctgaacaggttccactaccaacaaagatactacatggtttcataaaacccataacgcttacaaaaggctggccgctgaatctctgttaggaatgtgcactgttccaggttccaagccctttattttcatcttccaagtacatgtcattggtgcccacttggcaaaatgtaaatgggttcattgtgctttgggtcttgtcattcccattacatgagaaagcagagatgtgtcgttctctataagcagcctccgaagcctagggcagcagagactctggccagcaagtagcactgttaggggtaggtggtcctatgccagcgcaaagatgtctgtgacaagagttggcaacctgctcaagtttacatgtattaggacaagctgggagttctgtgggctcctaagttctattaagaacatagtttgaaggaatatgtcaagaccccaaaggctataaagagtaactcctttttcatatctctgccatagatggaaagttctgtagtgacctagtgttaaaatgagcataaggaggctgtattttttgtggttgttttgtttttcattcctttgcttttttttttcttagtcactgacaatatattgacagtcgatttctaaatctgttacccagatgagtgtatgatccagaaaaacggctaactttctcaactccacacttatttttttaatcctgtcaagcacagccaaatgaaaattaccatcactagacattggactttctggggtcccctaagttttaccaggagccatttctttccctaaagaattactgtccagaaagtggccagttgcataaagcaactgccataatcctgttatgctgacttggtcttcaaaataaatggagccaacagagcagaaagcaatgctcagaacagattaacactgcaggctttgaaatactccccaccctgggcatttgctaaaaacacactttaatctctgatcagcatgccattttcagggtttagtcacactggagtggaatgaatcacaccctgaaattctttccatcctttcccacttgtgaccatacgctaatgatcagttttatttatgggcaccaaaaaatgccattttgttgttttggttatggaaatcccaggatggttttgttttcagtctccaagaaagctctgtgcagagcctggatcaacatccaggagaggaaatcccctccctggcacaatcaaacaagacaattgcttggtgtgggcagttagcatagacagggcctctcagcaatggtcatttgtgagttcagcccagtaccaggggaagcaaagaatgtccaaagtggcagtgtttattcttttggaggctcctagtcctagccaactcctagctggtatgaatatgaccgctggggaatagatgaacaaggaaaacaaacattattttgccaacttgtaggtttctttgtcagcatctagtgccagctccgtgctctctggaaatatgtgctggtggttgcactcccttgattaggagcacaggctgctggctgcatttgctggagactgtagcctgggccagaaggaaagatagacatggggaaagggcgtatgtcgaaggggccaaaggaggctcttcctgaagctctgctttttatggccttttcagggcctcccaaacactaaacatcatctcctaatgaaaataagcccagagcagttgctggcttcattcctttgcagttactggccttgtgttcagccctctgggaaacagcagtttcttcttactttaattcttgctttactgggggctggggcgggggtggggggtgggggagggagggtggattaatcagacaaagaaatcattatagattcaagtcatgtacttctcctccaaagtaggtttcttgttctcactgtctcccccagggaactctccagtgaattccctatcagtcagctgagggcttgagagtgaggaaggaagggaggagcaggaggagggaggcccagtgagaggtgaaggggtgctgcccattgagacattacccagagctgccttcctgcctggctttggccctgggtgctgtgaaggactcagacacaaacatgcatgaaaactctcatccaaactgctctgccttctacaaagcaactttgatgaaaccttggatatgggagtacgagtgtcagtgtttgtttctttaagtcttatcttcccttcacccctagtccatgcacacttaagataagtgttcagcatgtgagctctgctggaatagggcttaggaaagaaaacccctttctatagaatgtaccactgagttgagggatcccagtcagttatacagttgggcaaatttcgaggtatccatgagggttgcagccatgtgagacagacttggagggtttccacatgggagataggagatcctggccatgctcttcagtgcagacatggggaatgcatgtcacttctgtgatttccagaatatacttttgcaggttgtattttgatttcctctgaagaaacatacctgttatgttttactcctaatcttgtaaaatatccaattttcaggatagatgagatttcctaaaagtataactagataatcaacagcctttagtgaactcaacattcaaaagcaaaaccagctttcacctgagacttccaagacttagaaaaatcaatctttatactatattatatgcaatgtctctccagagaaagcaagaatccccagactgatgagaaagaagaaagcaaaagatagaaaagatcctagagtagtctgggtgttttctatcagatgaagcaaataggtattttgtaagtgattgaaagtgtgtgttcctaaggcagagggagtgcctataaatactcatttcaggtttatagttgatcccaccaagggaggctaagtacaattactaatcataatagagtccaagaattggttgcaaaaatgagctcaaaacagggctgatatgtctagatttatcttttaactaatgtcctttttttttttttttttttttgcatccttgttagatctacacaggtcttgattttcactctccaagaatagcccagttgtgttctcgatcaccatcggcgaatcccatgcagatttccagcactgataatgaactagcaatccgatttaagacagacagctctttaaatggaagaggtttcaatgcctcatggcgagcagtccctggaggtaggtgaacctacggaatcatgctgtaagcttttgagctgaagcctagatgaattttacaaaattattagaagaagacatgagagttatcccttaatgactttgtgacttctcaatatcatgacagggtttaacgttctaaggatatgaataagccaatcagtccatgtacgagcagaattgaggtggttggagagacttgttagctgaacgcatgactaggtcctgttctccaggtgacatcagaaaatggttggagagtgtactaatgctttgattcaaccatgaatccgagtttccagactctgaaggtccttgtccccaattggttttcgattgatcaataaagatgccaacagccaatggctgggcatggggcaggacacttacagttgtataggtaggatgcagagaagaatgagagattccccataactccgggaagaagggtgggatacagagcttcaggagataaagccaaccagccacgtgagattttgggtaaatggccacttcaggggaaggtttagaagtacccagtctttgaggtagccaaggcatttaaaaataagataatgtgtgtgtctttcatttgaggatccaaaaatagctcccgggtgggtgcacatgtgtgatccaccaggagccaaagcagtgtaccaaaaacttcagcaagcgtaagtgtccaattgcatacatcatgccatagactaggttttggactcttaggaaatgtaaaaagaaataagcattaaatttgtcaaatccaaaattaagtgttgcaatactgattttctgcctaagatctcaggctgtcaaaataagttacttactttaaatgttaaatactttttaacaaagtgttttaatagacactcaggcctggtgaggttagtggtgtttatgaaatggttactatatccctggtatttttctaactaataagaattattttatttaatagttacaacttacactgtgagggaattctcttgtatatcctcatcttataagcacagacaggaaacttagaggactcgttgacttgtccaaggtcccatagctgtttcctaggacagagatgtgacatgaggccaccttaagtcacttccttaatgccaagagagtatggagctatgtgaaatctctctagagtgaattacatattaatttatttgtatagcattcaggttaatccctctgcccaaaaacattgctgaaattttctatcagttgtttgtatgatcataaatccaaggagcgctgacagatacttggtaacattgtaagaattaaatacaacttatggaatgaggtctacctagaatattaacaattgcagagccagacattaagtaatttataacatcataagctattggactaggaaacatttcaaaggcaaggatgattcttagagcataggtttgaaagaacccatgaaaaaatgaattcacctgtatttaggtttcctgctgtttttattattttgagacagggtcatatatagatcatgatgactgcagactttccatgtattaacagataactttgaacttctgatccctcttctccacctctgggtaggattatgggatgcatggctatgcacagtgtattcagtgctggagtttgaaactaggttcaagtgcatgttagacaagcgctctaccagctgaattataccctacattattattttaattaacttttggcaccaatatttatagtatttaatgtattatgctagtattacccatgttcccttatttatgttgggataaatgatttaatatgattagttctttgatggctttagcatagaaccaatacaatagctaaaccgagtagggtattatctgcctgtgcttggcaccagactgcttacatttttatataacagggatatctcgagtggctgaactctgtctcctacttgcaggttgcggtgggattttccaggtttccagaggagaaattcattctccaaattaccccaacaactacagagctaacacggagtgctcttggatcattcaagttgagaaatatcaccgtgttcttttgaacattactgactttgaccttgaagctacagattcttgtcttatggtaagtggcacaaattaattaccattacagcatggacaaattttctatacttattagttataggtgttttcagattggtcataggagaccaattcctaacaattttaaaggcattgttgagagggtttttcttttggttgttgttgttgttatttgcttaaaatctgatcaggaggtagatgatttaaaggtttgttcagcagctgtgttgaaatagcttcaatagccttatctcagtctattatctgacaaaaagaggaaagggcagtgtgtgtgtgtctgtgtgtgtacacatgtgtgtttgtaaaccatgatttctatacaagccttcttatgcacatgactgtgcacaaagctgtggaaagaattgtcataactagtttaggtaggttatcattaagcttctgcggtcccaggagagttttattttttttatgattagagtttttcagttcaaattaatactctgataggaccaaacaggctgggaggttggggttcagaaagagatgtagctattagtgggttttatagtaagatgtttttgctgctaccaacagctaaagtttctgactcgaagttaatatgttggcagttaatgtacgaatgaatgaagtattctttatctatgtaatttaaagaggtttggcaaaatattttccatgtttcattggtttataggtatttcattctaacacaaacctggctttcttgtttaatggatcttcttatttcagctttctgacagcttcttatacacattccaactggctgccttcttttaaaggtgactcaggaaaatccaaaaggttttccacgtttcaaaatcatcaagttgattgtgtgtattttaagtattattttccaaggttggatcattaggaaaagtatatgcgacttatggttatatacttacaccccatacaagtctttagagtcagagtgaataaggtatcatatggaggacatctattccccttaatggtaatttggaccaactctcctaaaaggaatatttaaaagttggatgacatttaaatacatctttctaaatgtagctgtgtcttacttaatacgtgagaggaaagtgagcacagaatttggagcagtctttgcctgcaagggctttggccattcagagaaggtcagcaatagttctggggcttctggagcaatggggacagtgagcccatggcctagggagctgcaggtactgcacaacaattatatcctaagtaatatgaaagtataatagcttctacagagactgcttctgggcttccagtcatttgcatgtcaccagacatctcaagataggggataaaggagaagagatcttgtgttgcttatatgttaaggtatagataattggaagaaacactctaaagccttctgaagggaaatagaatcatcttagacccctgttttcatgtgcaatagcctgcagcttgtcacaggcactcgtccacctgacaggatgctattgtataaatgagatgcagcagaacaacaaaccaaactaaacctgctggcatgccaagtactgaggccaccagacacatgattaccaagatcctggagataaaaaaaatcaaactaaaacatttcagtaaaggattgcaagctataaaaagtcacagtgcaaccctaaaaaagaccaaactgacagttctagaacaaaaaaacatagtgcctaaattgaagactccataatgtttgagaaaattagattaagatgaagtgagcaataaggaacaggaagataagtcaagataatgaccgtgaagaaaagcacaggtggacatgagaggcacagacacgtgaaagagattcatagaaaccctagaaggaaaagagcagagaatcaaacagaagcaatagctagtgagctaatgatggattaagacttctgaaagtgataaaaaaatttttaatgaaattactcaattcacaagcagaataaataggcatatttacttaagaaaaacttaaagtgaggggtgggttgggttggggaaagactgtctttcagaatgttacagatgaaatgctgacttcttatagcaataagtaaaagcaaacaaacaaaaggtaaatggaattgtatgttccagctaaagaaagaaacattataggattgtaaaaattctttacaagcaaaaccgaaataaatattgtttcaaagaagggtcgtcaataggagtttaaaagggttagaagcatactgtctactcatagactggggcaagaggcagctcttcactcccccctccccttagcatccacggtgtagctgagtggagatacagttcttcctgcattcatttcatgatccctagagttcaacatacagactgtgataaggtcaaagcccaggttagaggcacacccagtttgggagtgtttttcctttctgtgttcatgaagtgactttttttttccatagaccttggggacaaaaacacagacaaaagttgtgttaactacccacatgtctccatgcatatcagggcttggcttaaccaactatagcagtagagaatgggcaagaggaagggaaacctcatagtatgtcatcagaggatagagctgggtgtgtaaactggcagacaggtgctgggtgggatttagcttggcagatacatcaaaacacaaaatgtgatcagaacacattgacaggatgaaacagctggtgtagcctaggcaagtggacagaagggttctgagaagcaggtaccctgaaacactcagcaaagcggcatataaagggtaaaccacatcaacactgtgagttaccgtagtgcattggctctgacatctaggtagaatgaacctgagtctagcccagcacggtcattactagctgtgctgcttgaggagaggtcatcattcagctttagtttcactaactggaacaggttaataagagggctcctgacacattcattattgatctgagaaaaggtggaagacgcgcttgctgtccaagagaagctttcaactgtagacttcagcatgcttctgttactgatggcacgtgtgatttcaggcaggcatgttcaacaagcaaaagaagaggcagcatggaatgctgggagaatcactgggcttaggagcaagtagggagtgcctcacctctgacactgggcctcagactccttagatgcagaaggttatcaatcttccttatagaattccagctggcacttagtataccaagaaccttgcacactcccataattataacaagaaagtagcagagaaatgattcactgggtcctggaagctttcacactggaggtggcatttaagtgacaaggatcacagagtaaggtaggggtgagggaggctgccagagaaggaaggaaggaaatagcacatggacttcagaacgggaaagacaagctttgtgcccgcaatgtagacagttgttaagaagcatggagacgaaagaaagccaaaagaagccatctaagttgaatgcgctactgtacactttccattggatagaggaataggtcgctcacaattgtgttttacaatgagtggtgtaaggaataagttagtagagaaagaaaatggttcaatagagactcttgaaccagtggggaatgcttgagtgataaagccttattttgggcagttgtcttgagaatggaatccaggcaccattcacactacagatctgtcatgatgaccaagaggaagacccatgggccagttacatgatggaaggaggatgggtggcagaaggtggagttagttatttctgtaaagagcacttgaatgacaaagcaatcaactgaataaagagttaagctaggaagtgtttacatggctaccctatagagtttggtactcaaggtgggggtcataggtagagatctgtatctgtatctgtatctgtatctgtatctgtatctgtatctgtatctgtatctgtatctgtatctgtatctgtatctgtatctgtatctgtatctgtatctgtatcatctgtatctgtatctgtatctgtatctgtatctgtatctgtatctgtatctgtatctgtatctgtatctgtatctgtatcatctgtatctgtatctgtatctgtatatctgtatccatatccgtatccatagatatatatgtatatgagtaaatgtgtttttacttggatagttcttaaagtcatgggaataagtatggtctcttataggaggattgtataaactcttagaggtcatgccactaatcaaggggcaaatgaaagctaagagaacaagagagagtggtctcagagacacctaggatgaagctgaatgtaaaaagtgggtgacaaaaggtgtcacacgaactagaaatgacagtgtaataagagtggaaacagaatcactgctcactgtgggtagttgatggaagactctagatcacatcaggatagaaagtgccgaacttcttgagtgttccatagaattatagacataagtggcatggatagataaaaggcaataacctgtggataaaagaaatcaatggaaaattatactttaaaagtcataggaaaacaatatatatatgtgtatattatatataagtcataggaaaactatatattcatccttatgatatattgatatatatatctcacataagggtgaggtgcttatggtaaaagaacagtcaaatgtaagaggcaagagtaatggttgcagtcatgttatcagtacacagtgttagggtttgaatctgaggtatctctcaaaggctaatgattttagcactcggtttttagttgggctgctatttggagggagggctgtggagctttgggtgttggcgtaggtcagcagacacttcagtaggtcactaagaacatctgtgtgactcttatacttgtcccacattctgaatttgttgttttctggtttatgctatatgagttattcagctcctgtgttcgtgacaccagagatggagcctcttcatcactatgctttttgtgtcatgatgagctgaagtggccgggaaaccatcagctgagtcaagaccccccctccctttagttgcctctgtcagatgttctgttgctaacacaaaattaaacaaggcaggaacccagatggatcctataattgtatgtctttagaatgagaaattagaatacatgtcctaatatttttctgatttatacatttatgttctgaatggtataaactgtataagctaagtcgtcttatatagtttggaaactatcttcacaacaacatcattaaatataaaaaaattacacaggtacattagaatagagatctgctgtgcacagttgccaagtacactcagttgtgggaacaggaggtctacagagatttggagccggtctgggcaatgctccggtaatgctggagcctggctccaagatgtagttagttatccagagattcatgaaggcccacattgaaaccccagccatttatctttatgaccagatggacactggatgtgaaatgtacccccgtgtccaaaaccttacataataatctctgtagcttaagctcatacaaagctaatcattcattttagagacacaaagttaattccttggtcctggagcttagatagagccattagtaaggggaaaaaaaataacagcagccaataatgctttctcaaatgattgtattcagggcatttttagcaaaactaaagtgtaccattaataccacggtaaactaggcttaaaaacagggacaagtcatcctgtttatatgaaaatgtagtaattagttgattatagcaaaaataagaaccgtcatcgggtcataaagacacagaatgctgaagtcaggacacattacaaatcatttagtatcctctccataaaagtctcctttaaaaagagggcgattaatagagcctatgtcaaggtccagcacacattaatagcaggcccagtactcagaggtaacccttatcatacatactccctaaggtaagaataagtattttgataaaatataaaaattgtcttctatttctggtgaacctagacttgaattctcactgaaagaaaacatttaaacatgaagtggaaaatgttcttgtttagaagttgggaggtctacattccatggactagctgcctcattcattcacttgttcattcattcattcattcattagttcattcaatgtaggtattgattatgagcagtcaccacgaggccattggtattgagtgtggcatatcccccaccccctctacccttgatctaaggatcttagtttgctacaggctctgagaacctgggacattcaagaagagcatctgctttgagcccgtgcttgtgagaaggaagagggaaaaggggttgaccaagcccgttagtcaacaggttctccagtgcaggagtgaggattaaaaagaaaaaggacagccagacaacattgtagcgtgaccccagtcaattctgaaactgaaggcacattttttattttccaacccactttttttttaattaggtattttcctcgtttacattttcaatgctatcccaaaagtcccccatacccacccccacaatcccctacccactcactccccctttttggccctggggttcccctgtactggggcatataaagtttgggtgtccaatgggcctctctttgcagtgatggccaactaggccatcttttgatacatatgtagctacagtcaagagctccggggtactggttagttcatattgttgttccacctatagggttgcagttccctttagctccttgggtaatttctctagctcctccattgggggccctgtgatccatccacttctgtgtttgctaggccccggcatagtctcacaagagacagctatatctgggttctttcagcaaaatcttgctagtgtatgcaatggtgtcagcgtttggaagctgattatggaatggatccctgcatatgacaatcactagatggtccatcctttcgtcacagctccaaattttgtctctgtaactccttccatgggtgttttgttcccatttctaagaaggggcaaagtgtccacactttggtcttcattcttcttgaatttcatgcgtttagcaaattgtatcttatatcttgggtatcctaagttttgggctaatatccacttatcagtgagtacatattgtgtgagttcctttgtgattgggttacctcactcaggatgatgccctccaggtccatccatttgcctaggaacttcataaattcattctttttaatagctgagtagtactccattgtgtaaatgtaccacattttctgtatccattcctctgttgaggggcatctgggttatttccagcttctggctattataaataaggctgctatgaacatagtggagcaagtgtccttcttaccggttgggacatcttctggatatatgcccaggagaggtattgctggatcctccggtagtactatgtccaattttctgaggaaccgccagactgatttccagagtggttgtacaagcctgcaatcccaccaacaatggaggagtgttcctctttctccacatcctcgccagcatctactgtcacctgagtttttgatcttagccattctgactggagtgaagtggaatctcagggttgttttgatttgcatttccctgatgattaaggatgttgaacattttttcaggtgcttctcagccattcggtattcctcaggtgagaattctttgttcagctctgagccccatttttaaatggggttatttgattttctggagtccaccttcttgagttctttatatatgttggatattagtcccctatccgatttgggataggtaaagatcctttcccaatctgttggtggcctttttgtcttattgacgtccaacccactttttataccattttaattacatgcaagtattttgggcaaacagtacaataagtaactaacaaagcagcaagtgattactcccatgacagtttaaaagggcttgtcataatgaccaaaatacctgagcccactttcttgtccaagcccaaaatcttgtctgaagcctagttctgttctaccctaagactaaaattcctgcctttccctacttctctattacagcctgaagttagattcttgccaaaacttacttccttattatgccctaatgtcagattcctgcctgagcttacttccttgtcatggccaatgtcagattcctgtctaaagcccatttccttgtctttggccaatgtcagactcctgccaagtggtactccagaaggctttccacaggaggttacaatggatggtaagggcaatattctgtcaaagtctgactctcaggacctctcacattcagtctctggaatgcaagcacagtggggtttgagtggcagtcgcatctttctctctgtgtgttcagatcacagctcatctagaagggaggacaagcccacagatagccccaagctggagcatcaggactgaaaggcaaacttcagcattcagaggaaacaaattaaaaattaaaaatagagccatcggccaaatacaacctcccctccccctttggttgttcctatcaggtgttctatcactgtgatgaacaattaactaaggcaataaggtaataaataccatccatcttctttcatataacccacagcagtctgtacccataggcagaaatctgatgcatggattcctcctaatagacacaccgtaattatatgagtgaatgagtccttgccatctgtactcctgctgggatccgtgcattttaagatttgcagaggacactgtcattgacataggacctcattattttgagttgcatgaggacttagaaaacatggtacagatgtgttgtctagaatttcattctgctataatgaaaagggagggaaactgatttctttcaacacttctattaaaatgttgaggctcccacacacagctgacttgtactgggcttcatataatttggtaaaatgtccgtgattcctgcttgcctgctttccagcctggtgttagctctcctctgactttggggatgataagtcatgagtgtttaatgctagacagcatttgctggctggggggtggctctgtgtagtcatcagggaaaagtgactccattatgttttctttcctgaagggtaagtgttaaagtgacctccaaccgccagtttaattgcttcgttagaatttctcttctgagccttaggtactatgggtctgtaagttcttattgatctgggagaaaacggctgcactctgtgtgagaaggagggggagggacagactgcggtgggggaggggggagaaggaagggctgctgagaggctgacctctgtttccagcagcctctgtgctcagtgcaatggaatgtctgccttgtgtgaatcagtgcagataaaaaagcaagcagagcacaggccatcctgcctattatttgcaaggagaaatgcactcaggcaaacagctggagcaggaggaggaggaggaggaggaggaggaggaggaggaggaggaggaggaggaggaggaggaggaggaggaggcaagcagcccctaactggttcggttttggttgtttgtttttcctgaagcttttggtgactgtctaagggaaaaagaaaggaagccaagtgtctgatctgaactgaaacaatccagacccacaagcctcactctgaggcaccagagcctgttgttctcacattatctgcccacaacacccagagctcaacaggacaggcgcctaaggcagggtccataatttgtctccccccaaccccccttcgatgcagcccatgatatgcttgcatttaaaacacagtcacttcccagaggggactgaagggagtcaggagtaatcgataactagagtttcagagaaagggaaacagccttctttaaatatttactgttttacaatgagttcaggacagtcaccctccttccttctcccctcctttttaggtcctccccattctccttttctctcccttcttcccttctttcttgatccccatcagacgttttaggttgcttgagcaagggctttgaaatgtttgttttgtgattcacttgtgataatctgcttagccattcccatgcctatgtcaaatgaatctccggtagctatgccaaagcaaagcaaggaactgagctgaagccacagctcatgggccagggtatttatcatgtttgatgttcatgttggctccgtctttttaaacgtttccttcttgagggatctttacggccctgctcctaggcctggtcacatctcctagtcttttgaaaaatgtgaaggccgaatggcatagtgtacaataacagcttaaaagtaggagtcctgaactgagatggaagtttgtcaatttaacttggttttccatttcagaccagcgtactgggaaatatcattaatgcggaagcccagcttccttcctctctcccctcaaaaaaagccattgcaaggagtcaggtttctgtatccttccctgattacatctatgactctaacagcatggaccatatcccgagagcctcccttctttgtcatttagtacttcctctcttttggggccagatttgaagctgagaattcccttagcagctacgctaccatatataacatggaggtggttcatgagttctctgttctcaaggttgattttgtatcttgatatggtataaaccaatgacacgactgctccacgctatgggaagattcgattgtgcatcagagagaaaaaatatacagtggcatctggaagagcctagagcaggtagaaaaagaagtagactgaacacagccagaagactggtcatggccagtgctatcttccagagaggggaaagtagcagaggagagagaatagagaaagtctagtgaggctagacctaggttataagaagtgggggtggaggtgggtggagaccagcgggtgagcattgaaatgtataacaaatacttgtgaatggggactgagggagcctggggccagcatggacattgatatgctgagaggtgccagaggtgtatgttagttggagaaccttttgtcttgctggaggtaaaggaaaagactcctttggtagactgaaactgacttcacaagttcctgaggaatgctgggctttatctaacgtccagaaacccacctttaatccaggttgggcccatttctgatattttgagtaccttttggagtttgggggattagagtttactttggacctgacagatatgaatagttcttttactgccatagatcttgcccttcccatgtttcttttactgtgctaagatttaattcacttaagcagagacatgaattgccagatggagttcaaatctcgtaaagatcaggatggaagtgaggagctgtgctgtgccagagatctgcagttaggcccaggaaaggcagcatgcagacactagtatacccgggtccaagagcgcaagcgcatttagcagtcaggaatgtaagttttaggtttatttgttagccttcactctgggctgttggttagacaccttgatgaattagccatgctggtaatgctatggctgttcagtggaatgcgtgactctgaaatccacaggagctcaacacaaggctttctaaaatgtccctgtattagtcaggcttctctaaaggaaaaggctaggtgaacttgccagttagaatgagggcaagcaggcaaaaaggcaaaagcttctttcttccttatgctcttatgtgagcttctaccagaagggaggtgtggcatagagtttgagtgagctttatgacctcaaatgatccaaccaagaaacccccctcacaggtgtgcccagctgctggggtcctcattaattctagatgaagtcaagttgacaagcgagattagccatcacaacctccaaggatgccctattgcagtcttcaaaatgcgggaagctccaatgattatctttctaaaaggtcatggggaactcatgtcacttcacagaattctggtctcttaatattgagttaaatgaatgcaatttgtttacctttcccctccatttaatgataatcaatatgatgtcagaaagacatgatttgtactgttctgagctactattacgtatttgattccaagtcacttacattttctaagtcttttaaatttccaagctgcaaaatggggccataagaactaactcacaaactgtatttgtgagcacttataggtgcctcatactatggtttgtctgttcctgccaaagttcccattactccttcttctagcctggttagtcatactatgttaaaagtcttatttatcattttacattgtggaccttaggaacacagaactgatccagcatcctcagctctttgcccaccaacatcattaaatcataaatagtccccacttaaaaattttggtgttttttagtcttcaatgtatcatcctaatgaaattaacatgtaagtacacttttatggactaattttgtattcatgtgggtatgcatgtggaggtcagaagacaactcactagaactacttctctccttctgtcatgtgagtggatcccaaggctcgaactcaggtcatcaggcttgtctgcaggtgttcttacctactgagccatttcaccagcccccgcctaacacgtttgaccatgctacagttgcattgttttgctatttcccagaagactggcaaatgaggggacaaaaagtatagtgccacaaatggaaataaaagtatacactgtacattcccagtttctcctcctgcaaagctcaacttggtgcaattcattttggccctgcaatcagggtgagctttaggtagtaagtggtgactgatagttccatcggatgaacatgagccatttaatctcttcagggtcatgaacagaacagagcaggtactccaggctgcagtggttactagcagccacactagtcacatgttcttccattcttaaaggtagccactagtgactgcttatctctgatgtaatctgcattacctgaagggttcttcagttttcccttgcattggacttcagagacagcacgtggcacagtggcagttgcctggataccgaactgaaagatgacacaaagccaaggcagaaaacaactgatcaaggcatgagcccagaagaggctccaggcatgaggagaagagatggaaacaaagttgtggcagagcatatggacagcatgctgacccactgggttgggaactagaggagagatgtaaaaagttttgtcataagtattcatgctatttaatagctatctgttacacaccaacactataccagaaacacttttaattctatttacttatttagttcgccaaaatagtatgtgataaaaactaatattagcgccatttcacagagtaggtggctgagtaatgattaggaagtacaagatagggagggacttgtcccccaaagatgaaacattacctcgattattctagtcccacatagaagcttataaagatgttttgctaaataagattatttttccaactaaaagaaatctgccatcaatatttcaatgtcacatatagttcattagtaatgaatatttatatcaacatatcatgtacaacaaagtaaaagattctaactgcatttttttcaaatagccattctgtaagactctgaatgtagagcctttcctcccagaactgtaaatgtcacccagaagggatgtcagtctctcactggaatgattatcttcctaatgccacttgatgtatgacgaggagaggcatgtattaacctggcgttggttgacatttagtcaaattcatgatatatgatattgaaatgtcaaacatgaaaactcctaatccattagctcagttcctgcttctggctaaggctcaggctatggaaagagcggacacattgcatgatgtatccagtatccgacatacgctgggctgtgggataagttcaaagtcttggaccacctcatccttcccccttctctcacactgccagagaaaggcacctgggagctgagtgtgtagagttggctatgtcctgtgactgcacccctgccctttactccctgggcctagaatatagaaaaccttgcatgacagcagccacaggggacctggcatcagccacatttgacttcacctcctctaaagagcttcttactattgagcctactttgttttttatactccacctaatgtgggagtgggcagcttcttcttagggctttttctcagcctagccctctattctcagaaactataaactgacacattaatacatttggcctttcctggctattatgtgccaggttctggactttttctttctttttacacacaaagttacatttttgggttattaaatatgtgtactagaatcttgtgattttatactatccccaatcctttcctgtggaaatgtttagcagttaaccagatcttctgcaacttcttgagaactctgttagttggaactcacgaacatggttgctatttttaattttgtggattcagcatcaaaaatcttatttcactagtgtcacctagaggaaaaaagtaagttgagagttttgtcttgtgtgtatactgctctggcatttcttatttaagtagcaggttagaaagcctagtctttcttggcagcagacttaagaattacttatgctatatgaatatattaaacacatatccaatggtgatacaattactagctctgctttgggagccaaagtagaaataaagggccatacatattgatagttttatggcagtacagctttaaatacgcatgaatagagcttctcatattttctttcttgaagtgtttccttataactttgcaaattaaaaatcaaaatgcaacaccattgtcttaatattgcaaatgctgaaagcactctcaagtagaattgatatttcaaatgaaatttaaatactgtctcattggttgtgtgaggctttggaattttaccaaatgataattaatatgcataaaatatttatttatatagccagtatcttattatagtctactgtgggcatgaatttatgatatcctgccgcagtcttccaaattctggggttacaagcacatgacaataaaccagctatcaccagtgctttaaaagaagcactgttatgtagaatttgacgagtgaagattcatgctcactagctgtgtgatcttagatgagctactagcttatcttgggtagggcatgattttataacaagcacattagtctcactttatttaaaaacaatcacatgttagtgcagactaatgagatttgcagtgatgctaataaaaagcatgcacgcacacacacacacacacacacacacacacacacacacacacacatttagtatgctattggtacataacttcaatttaactacaagaattgcctaggaagatgggaagagaatctcaaggaggcattatctacattaagttggcctatagacatgtttatgggggatttgttttaattcattgacatcggcactttgggtggcaccatttcttaggtaaaatgatctgaactatataagagtaatcaaactgagcacaagcaaggaaggggctttgcatgcattcatttctctctactctgttcttgaatgtgctgcgattgaatgtgtatttgaggttcctgccatgacttttccacaatgaaatactgtaaagtagaattataaactgaaagaagcccctttcttccctaaattacttgtcagggtattttatcacagcggcagaaattaaattagaacatttttttttaaaagtgtggacttggagaggttcaaatttctattatttgggaagttagaatatacttattagagtctagtattttaccagagtttaagaattaaaccaattaagaggaatgtttgtgatagtttatatggtgttttggctattatttgtctaaaagaatcaaccatactggactggaaaccatgtttatttattttgaaattctcattacacatccacaatttattttgatcataatcagtcctcagaacccctcccactcgtcctgaatccctcttcacacttccgtgcccttcgtttgcttccttgcttaataaatgtataaactgacaagacatctattccatggtatgatgaaggggggaaggtttttattgtgtatatataagagagtgaacagctagaggcagctgtatgagtccagagcaaagagagaaagcagcagactgaccatagcagactgaccaaacctggccagggctatttgtaaaagaggcatgagaagcctgggtagagaatagagaaaacagagtgagaaaagcaagagcagaccatagaaaacacatggagggtagcagagctataaagataatgggtagctgagggatagggatgtgaagagaaacccaagggccggaaggagtttagaaggaggggaaagggaggaagacttgtccactaggatggactttgaaatgtgcaacaagctttgtctctgtaactccttccaagggtattttgttcccacttctaaggaggggcatagtgtccacacttcagtcttcatttttcttgagtttcatgtgtttaggaaattgtatcttatatcttgggtatcctaggttttgggctaatatctacttatcagtgagtacatattgtgtgagttcctttgtgaatgtgttacctcactcaggatgatgccctccaggtccatccatttggctaggaatttcataaattcattctttttaatagctgagtagtaagtactccattgtgtagatgtaccacattttctgtatccattcctctgttgaggggcatctgggttctttccagcttctagaagtgggaacaaaacacccttggaaggagttacagagacaaagtttggagctgagatgaaaggatggaccatgtagagactgccatatccagggatccaccccataatcagcatccaaacgctgacaccattgcatacactagcaagattttatcgaaaggacccagatgtagctgtctcatgtgagactatgccggggcctagcaaacacagaagtggatgctcacagtcagctaatggatggatcacagggctcccaatggaggagctagagaaagtacccaaggagctaaagggatctgcaaccctataggtggatcaacattttgaactaaccagtaccccggagctcttgactctagctgcatatatatcaaaagatggcctagtcggccatcaatggaaagagaggcccattggacacccaaactttatatgccccagaacaggggaacgccagggccaaaaagggggagtgggcgggtaggggagggggggtgggtgggtatgggggacttttggtatagcattggaaatgtaaatgagctaaatacctaataaaaaatggaaagaaaaaaaaaaagaaatgtgcaacaagtacttgtgatactgaaggactttggaagccaacagctttggcatgctgatagacaccacaggtagtcatacatctctttggccagaggtaagggaagtgactagttttggtggacagaaattcacttcacaagttcctgaagaatcctggttttaactaaccatcagaaatcctcctatagttcaggttgagcccatttttggatatttggagtgtcgtggagtttggggaattggcggttattttggacctgagaatgactgtgctgcccatacattggagaactgtacactggagcatgaacaaggccaatagcaataaagaaaactgccttaccgttttctatcattcataggctaccataactgctaacctagggggtagagcctcttgagtccctcccttatccatgttgccatattgactagcttgatcttatgcaggcaaccacagctgtgtgggtttatggatgcaaagacccaatcatgtccaggagatactgtttttacagcactcctccctttttgctgattctacagtcatatctgctcccttcttcctggatattctctgagcttatagggaaaggtgtgagccagatgtcctgtttatggctgaatactctctgcagagaataagtgactggtcaaagtgatcagtactggaaattacattttaaattggctagaagaatataattcaattttcagtcaatgttggttgaataaaaatcatttttaaagcttcgcttactgaatgtttggatttgaaatatgaacactaaatgataagagggggagggagaaagaagcactgttctagaaccacattgactttgtgtttgttactctaaaagcctggtccctttttctgagaatttaaatcctattgctatcttattcccatgcttgcacaaatcaactcagaatgccctcccaaccctgcttatgtgagagcattctgatcatatatctcactagatatttcaggttacttgtgaataccgtccttactttagatttttgaatagtctgttatctcctctaaatttttagcaaagtatagatagcaattggtttttaaggagacagtcattattaatttaatttaacttatttcagatacttaatatattaatatatctaccctgttcaactgatatcttatattggataaaataagagtttcaagtttagtttcataacttatatgtgacttagattgtttatgagtttgttgatagagatataggtagagaaactgctcggaagagtcaatgagaaaggctgaatccattttcagtcagagtaggtacttaacaagtggcagcaagtattgccatacaagttcaagggactcatttatcactggttcacacataagtgttcagaaacgcatgttagctcagagtagcagactaatgaggacatttgagtttcatagagtgatgtggggatttgggcatacaggatataaacttcactccactggcccagaaggtagggttggagcagttccagcatagtcctggacagggatagaatttaatagatgtctttgaatgaggtattttttttcctaaaccaaactaatctcactcacattattagaagtattctgtcatttcttttgctcactatctatgatcctcgaggggcaaagggttccaagaatgttctgtttctaacaatgaatggttgctcattatagtctctagacactataatgaccaaatcctaagccatgttcctggatagcaagataatgaaataaggcattttttttctagatccagtcaatgtgatattttactagttcattgatatgcagatagcccacagaatatgagtcttatacatgtgaacttgcggtattaagacagttttctgtcttccatatttgtagacatatgatggctcaagttctgcaaacacccgtgtcgccactgtgtgtggaagacagcagccacctaattccatcacctcttcaggaaacagcctctttgtgagattccagtctggatcttccagccagagcaggggcttccgagctcaattcaggcaaggcaagtatcctatgggtcacctgagccctccttagtggtataatggcaccagacttcagaaactgatcacagcttccaacttaacatgaaaatgttcagaaatcgagacttgtaagtattctaactgttctacattttatttatcttcatctaccttaaatgataatgatgtcttaggttatgcatatctcttaagtgctgtgtttttagagtaatgtttaatggtatagtatcagtgatacataagacagaattagccaagttaatttccctagcacttatccaaggaaacacaactgggaaagagtcaggttctacttgcccagagtggttttccttgttgctgaatcccatagttttctattgtttttgtccttaagttactgccatttctcaatttcctctcccaagcattttcacccattgcctttcaccagaattttctgagattaatctttatcaaaccattagacagggaaggaacacagagattagagggattgttaactggtttgaattggggccatgatttttgtcgggatgactcagataatctatttcaaatattttttaattaaatgaattgtacatatatttacttgtaagtgtgtgtgtgtgtgtgtgtgtgtgtgtgtgtgcgtgtgtgtgtgtgttggtgcacatgtagaggtcagaggacaacttgtgggactcagaactagactcagttctctcactgtctggacctcagggattgaactcattcagcaggctgggtggcgactgcctttacctactgagctatctcattggccttgcctccaataatgtttgcctgcttaataatcatatccctgtctatatccatattaggagacttataggtatcacattagtgaacgatcctggttggacacaatttctgagtcagtcctcccaaaggtacactggagcaagacactaggtgtgctctatcattcttggtgatttcaaagacaaagcagtacttaacagtcatatatatatatataacatttccataggtgcagcttcagaatataactttcctattggcctgtctgatcttcagtatcagcctcctcaaactcacccacccttgctccatctttctaccaagtaacttgtaagagatacactctcatcagattgagggtcctcatggctgtccttactctgtgtggcttagatgaaaggcaagtccctacaactgttcactacagtccccaagccagtcctgaccctttcacaatgctgcttctagttctacctaagctttataagcttcagttcagactgtataaccgtggccctcctcacccatgtcatgctcaggctatgcattccctccaccattcttcttactctccacaccctgtctcagtcctgcctcctccagagaccaggacccaaccatgcaacacatcctcctctcctccgttcccacagagcattgagcttctctgtttaacttgaaatcatcttcatacatggagtgtttcctagagaggaaaaactcatctatgaataaattattccctcttataatttatcagcaaacagagtaagtgaaccaaggccagagtatgagttgaatgattcagataattcacaactgtttgtggtgttctatgccgtgtgtccccacttcttataattgaaagacattataaatgtaaagtgttttctcattatctggtggcttctttgcggcttccttggtatgtgctatggaaataagaagaatgtatttgcattttcacacacctaatgtctttatttggtatagttgataggaaccaaaagtgtatgacatgtgtgtctgtgcttcccagagtgcggagcccacatcattactgactcttcagatagcatctcctctccactgtacccagccaactatccaaacaaccagaactgtacctggataattgaagctcaacctccatgtaagtaacaaaaatcaaaaggaggggagtctggggaaagtggctcttctgagaggtaaggctgtgaactgcatttaacctcctcagtggcagcaactgacaattggcttcttcctgggatgcatggaaacagacactttctggcctagtacgaaagcacttttaaaaggattcgcattcatctaaaagaattgttaagtctggatgtggcgattctagcaccctgcaggctaaggcagaaggattttgagttggagaccagcctgggctcaacagtcaattcaaggctcgcctgagtaacatatggagatcttgtctctgatgaacaaacaaaccaagggctggggagagctcagtggactgagtacctacctatcactattgaagccctgggttctatccccacaactaaatgaatcgcatttagttaatggtattgcatgcttgtcgctccaacttctggtaggagaaccagaagtacaaggtcatcgtccattcatacctagttggaggctactctgggatcagtgagatgctttgtgcaacaacaaaccaacagaccaacaaaaagacaaacgactgaggatgcagttactagaacacttacctgcctgaaatgcacaaatacatacaaacaaagtgtacaaatacaagtaaagtagatggtgaatgaatatgtgaataaggatagagattggagaaatacctaactgttggaggacgcagggttgcaagttattgatcactaaaagggaaactaattgtaaaacctgatctctcctgcaatggatatatttatgaaatcagtgcatgcctagaggccctcaataaatgcttattttctctttcttcttttggggatcttagaattctgctatgtgacatggcaatagtccctccacattttccaggcagagaaaatgagatggcctttacaggcctggcagaatggctccaagcagactattccaggcctcattatgagtcctgtttcatctgaaccctcccctcctttcaggtctctaggaagaagttgtgatttaagacacaacgtgtgaaagccattaagttctcttctctgttctttaattaatgactttgtaaaaacaggacagtcacttaggctaatcaggtccctgcacaaaataattctcaaaaaagctggccttaaatattatctaacactttcacaaactgatagtattttatggccattcatggaatgtgggagctgacagataatgtaatccttagcctttgtacatggagagggtggagccccaacaaagccaagataaagaagccccctgcattgagctcagcagttttgtgcctcctgattattttctaatgatctgcaaaaacatctagatgaaagatctcaccgctacaaggacagcaacaggaaaagatccctttctgaggattagaaacgctgtaaagactacaagaggaaactgccatctgggcgctgactgttcttccatgattcaaagctttcttgatggatgattcagaagctctcgggcactgcttccgacccctaaataaatttgagtgtgctgggagccatgtccaggggggaaaatatgccttagtacaagtacatgtaaggactcagagcctaagaaagtgcttctcagaggaacacaacaatggctaacaaacaacacaaatagagcaaaacataacaaaacaaaacaaagcaagccgaaaactatgttttccaataagatgtctccagaagtccctgggatgaccctacccaagagtcctgatttaccatgcctggcattttggattctgcaggcatttttcaaaagcattgattctgttactcttcaaaggaagccctttagcgcgaagctgagcccttagctctgtttactcaccccacccctgtgcaaagctgccagaaagcaagggatttggcatcatctcagagtaccaggggcaaaatctctctgttctgcttgccagtgttttattaaataaccaacactcttctctctcttttttttctacagtcaatcatattgctctctcctttactcactttcatctgcaaagcagcacagattgcacacgggactttgtagaaattttggatggcagagactctgatgcacctgtccaaggtaccggagattttgtcatttcatctgtagtcttgtcacgtagtgtgtgtgtgtgtgtgtgtgtgtgtgtgtgtgtgtgtgtgcgtgtgcatcccaagtgtgcagccatgcacacagacattcacagtgttgacattcaaggttacagtgttttcaataagcatgaagagcctcaaaccacataagaataaccagagggtaggaaagcaggacaatgtggggctcatgaaattcaacttacttatcttctacatgcaatttgtgtattttaacttgtttctgaaaggcaagttgcagatactaaatgacagtctgaggcaggggcagtagtgtgacaaagactgttttggcattagacaaaagtctttctgaagcttctggagagtactttaaaatatgtcttatactccactggacatgtttcttctgtccccagtgggaggaaagcatttgaaaattagttaattgacttcattaaaagtccaccagttggtgtgctagacatcatgataaagtgtgtgatatagctcttgagatggttcagacaaaataacttcacatgctttaagctttctccatgagactttaccatggaaaagtctccctggcagagggaagcgccatcagaggaggtttcaatgctattcctgtgccgagaatggagcctgagagaatggtggacaaagaacaagccccaggcaaacccctcattgtaatgtttaagatattaatccattcacattggaacaggatgtgttatagaatgcacactcctacccagttatctcctgtggagtactgttctaagtattttataagtggtaactcagtctttacatccttatgagatgggtttaattatttctaatatgtcctcctcttcacatggggcaactaagtcacagagcacccacagtacttgtctcaggttatgttgctagtaaatgacaagcaaggcattgaacccatgtaacctggcccatcatctggagcctggtcacatcaactttcctctgtcctcctattgctttctattgggtttatgaatcatcctggctatgcttatttttgaggtttatccttagtggtcaggcattgtctcaaacacaaggctaatgtaagtggttctgcttgtgatttcttggttttgttttgttttgttttgttttgttttttgagacagggtttctctatatagctctgactgtcctggaactcattttgtagaccaggctggcctcgaactcagaaattcgcctgcctctgcctcccgagtgctgggattaaaggcgtgcacggccaccacgccctgctatgcttgtgatttcttgtatgtacctggaaaaactgtgtgtcgtccctgccatgctgtcactcacctccatgtggttctcttcaccctttaggccgttactgtggtacctctctgccccatcccatcatatcatttggcaatgccctgacagtgaggtttgtctctgattctgtgtacggttttgacggtttccatgccatctactctgcatcaacatcaggtgagtgggagggattagcattaacagatgacctcagggttagcagacatgtggtagaagtctttggcttgttatttggggctcttttcatttaacgttgggagctaattcttgaaatttcccctgtaccttctttataattcaatgtctacattctgacaaccatgaggtatagaagtgagaaaaatcatctgtaaacctggccatctcttagctaaaccttatttgtctgggagacctgttctctactgtcacagcaatgtaaacatgaagtgctaaggcactccatgactgccagtttgatagaagctcttatggatgtacagcctcatggttgttcttgtcttgggagcttgatggtggggtcaggtaggtctggctgtgcatgtccactgtgcagtgaggcatctaagcaggaaaggaaaggagtgccatccagccctgcggctcttggccaggtggggcaattacagccaatgtgtagaaagatgaagaacagtgtgtttcactaccctccgcagagggaaaagctgtagagtttctttttacatggcaaccagagaaaattaccttctcttccaggctagggttgaagagcatactggacaagattaaaaacaagtcttcctaaagttctagttcacatggagaaagccttttagaaaggggtcccctccagctcaccatactgtggagttcttgggtttctgttttcagactcctccctctgttactgtgcgtgacacagttgcttcttcatatggaatggacgcgctttgtccttcattttagatactggctctaatgcccttccacttgtgtcttgtggtgtcttccattttgtctttgctctgaaaccccctttgtttcttttgactttcagcttgtggtggaaccttctacacgggcgatggcatcttcaatagccctggctacccagaagactaccattctaatacagaatgtgtctggaacattgccagctcccctggaaatcacctgcagctgtcttttctgtaagtccttgtcaggcatgccctgtctcagtgtgggtaaatctgcagggaggaagcactgttactgacagaatggttgaccagcagcctgtgtctgagctatcagcagagagaacttgtgggagccttaggaaggctttcctcaatttctttggtttcatttgtagcttcagttgtataaagcattaagaatctttcaacaatattctttctttcaactgagaggagaggagagagagagagagaaggaggaggaggaggaggaggaggaggaggaggaggaggaggaggaggaggaggaggaaacacctgacttcatttggccttctttatccacacactatattcctattctaacccacccttcctttcttatcagagaagtgatcttggataggatttttttatttagtttcttaaattagccataattagtgatttgtaaaaactactttcaattttctcattgaatcttgacacttttggaacatggactatggattggagtgaatgggagatcttgtatgttccaagtagacctaggttagaccaaacagccataatagtatttcccagaagtagatgtaatggggagatgttatatgacatctgattgtttcattcctcagtagagaggttccaatgagcaaccacacctttaatcccaacactcagaggcagaggcagacagatctctttgaatctgaggctgacctggtctatacagtacacttcaggacagccaggactccatagaaagaccctgtctcaaaacgaataaataaataaaaagagacagacagatagatggctagatagtgagcaaagatatttactgaagacatgttagcatttaagttaccatgttgagttcaaaatcatgtgccatactatattacattattggggtcaggttgaaatcattaatactttgttgcttttttctttttcacatgtcctcagtgtgtagcccacaatgacctaaaacttaggatccttgcctttccatgcagagatagaaggcaatgatcctcctgcctttccttgctgttcagagacaacaggcatgcatgccaatgcctggctattaagtgcctctatgttgagaaaacattctttgctggtttttccttgaagacatgcctaattgtgctataagaactaattaagaatgagacaagctcaaacatttcaagttgctttcttgaatccatcagtcagcccatgcctcctcagggtgcaagtgacataagtaaaagccgtcttcctgtacctgaacgacaatgccagtttaaactgccatgtgggaatgtttgggagttgttttcactgaaatcatgacatttcttatgtaataagaaattgtacaactgtgcatctagtaatcgctccatgatgtgtatttctattcaacacatatttagcagcaccctgagcacataaagaatgcatgcttctttcctgggggtgccttatagacagtgatgagaaaagggttctcctgtcttagtgttgaaggtcaaggtccactatgtaacttgttgtagctcccaacttgccaagaatttcaatctcttttcttggtctttttcctcctacctcgaacacatttatgttgtacacctctctgatgttcagtggttccaggaactaggataggtcctgggaatatttagtacatctatgctctctgttctttgtagcagtgagtttgggctacaccactttggctcctggcaggctgagcacacccacccaggaactcttggattctctaatggaagacacacacacacacacacacacacacaccataccagttaattttaaaatgccttggctgggtactcaaaggctgggtactcctgccaccccaggtccaaatggggaaatggccagtggccactcaactgaattctcacatggctagttggctttctctcctgtgtcccatccttcttccccaactcatggcaatctcccttttctctctaccctgcccccgtgcccaagcccaagcaactctaagggtcctgccccatcttcctttgcccagcctttggccgctggcatctttattgatagatcaaaaaaaaaaaattggagacaaagacctttagcatttggacacacagattcccaattgaatcaaaacattcgaaccaatctccaacagttcttgacaaatttgttgataaatcaactttaagaagtcattgaattgaaagctcaaaagacacattttatccttagagagacaacaataaacttgaagggcctctgttaggattaaacatactaaattttaaaatacatagcccaaggccatgataaagaatgttcagtgaaggatgcttcattctttgttatgactgaagactcctctctggtgttttaggaaccacattttatggcccacagtaggctagagcacaggtacttatcttggttttcaacttgaaacaccagaacaacagcagaaagttatcgtgtgaatttatctatagggcgctgtcttgattagtaactgctgtgggcagcccagcccagtgtggttctgaactgtagaagaatcgcaggtgaatgccagcctgggcataaggctgtaagcagtgctccttggtctttgctttagttccttcctccagattcctgcctagagcccctgccagatctgtccatatgagggactgtaacctattaaccaaataaactctttccttgtcaagttactcttgataatggtgtctatcacagcaacagaaagtaaacaaggacagaaaggggcatccatttcacaagctgacagacattaagtcctaattactaaataggaaaatcttggtgactcagttgttcccttgttcacctatatgctgtttctttggcctttgtgttccttgtttgagtctttttttgttaaggtggcttttgaagaatgcaagttgcttttgctgtgtgtgttaatgtgaataagaaaggcaaggcccagagttatttctgccctgatctaaattacattcagatgtgtactagaacttgtgcctggggtgtgtgagagacatatgaaccacatcaagttctcaagcatagggtttagattatgaatgctgtggtgaaactgagtggggagggaaaaaatggataaattatagttgaatttgcaatgaaaaggaaagaggagaaataaaatttatataaagcagatattcaaagggctgaacagaaactgtacttcatgccagcagaggggtctgagaaaatggctggttctggtagcaggacaaaaatgcgataactagaaacagaaagggtattatttttattacacattatatttttactgacagatctttgccaaaatgtagatttgcttataaaacaaagactgctaagaataaagctttcataagaacttttgtttggcttttataagtttctccactgtaattcctgataggaagccattccggctgtttactcctggaagacagtccaatagttaggagagaccttccctgtgtaatctccgagattattggtcagaattttaaggaacattcagatcacctgagttttgctaaatttcataccctgatttagttgctatttagggatagattctcccgctaacccccctgaatatacaattattacctattcttttactgaaaatacattttcatataatatattctcattgcagtttccatgcctccacttccttcccccttcctcccccaaccaaatctacactttcccctctcattagaatataatcatctaaaataataactattattataaaagaaaatgatacaaaacacaatcaagaataacacaaaacaaaacagaaaaacaaagaaagaagaagaatcacaagaaacacagagtctgaggcagggtcacacatacagaaagcccataaaagcaaaattaaaagctataatatacaaggggaaaactctgtaagggaaaggggaaaaatgcccaggaaagcaggtggggttcagattctttatgtcaaatgaactcccacgtggtgctgggttgctgggttactgggtcacactgcatgcttctatagaatgctttcagagtaaggccctggattcaccctctgagatgagagaagagtcacctgtctcttttctcaaaagcagaataaaataacttcggtatgtttcacattgtgggtttattccactaaatataataaaattgatcctgaattatactgtttctcttataggtagtattgttttgcattttcttatttcaaagttccaaaggtagtatgttttgtagcaagagtttatatttcttatatttgagctcatatatgaaaaatgtaaattgatttcagcatataaagaaatagagtttattttccttactccagaaggatatccaaatattgtagtaggaacaggataatcttatatttgttccatgtttgctttgtaactgtttgtttgtttccaaattagatccttccagttggagaactctctaaactgtaacaaggattttgtggaaatccgagaaggaaatgccacgggccacttgatgggacgatactgtggaaactccctccctggcaattattcatcaatcgagggacataatctgtgggtcagatttgtctctgatggctcaggcactggaatgggcttccaggccagattcaaaaatagtaagatggtttgtttccataagggtttctagaatgtatcctacaaactaggaataatgataaaagttttagttatatattaactaagaagaattctacactctaccttcttttcaatataccagaaaaaattaattattaattatttatggatagatcactgatggcaaagaaaagtgtgcttgatgctttgagtattctttttaggctctagtttctacctgctattaatgatattgtacaaactggccttttaatatacttcaggcagttatatcaaacatgtttatttggtcttttaaatacattcttcaaacttagacctttagaattattttaggattgtcttaatcattcagataaaacctgggcaaatgcagataaaatattaattatttttattctttaacaagtttttcatgattggcaatactcagtgttgattctcatatagaattaaaaaatattttatttcataaacaaagaaaatttagtaatcataattaagatatgaaatggcaccctactccccaagtcccctggtgtctgggaaatctttttcacatgggaagttgccccatcttttcatagcctgcagccatctaaggagatggaattccattcaagactcatccttgaactaatagtccagaaaaccaaaagcaaagcagtatttcttttagtggtcagaaaagaaatggcagtcaattaaaagctcattctttccaacagtcttgccctttgtgtttgttctcagtttagttttgttttgtttttcattctattaaagaacaattataaataggtctgatttacaattctgttctctgttctagtatttggcaatgataatattgtgggaactcatgggaaaatcgcaactccattctggcctggaaattacccacttaactccaactacagatggacagtaaatgtggattcttctcatattatccatggtagaatcttagagatggacatagaattgacaacaaactgcttttatgacagtttaaaggtaatcttttgtgatggagatgtttttatactttgatggatactactggcaaaaataagttggaattcatacctactcaagtaaataacagacataggtgatggtcctaccatctcattactgttgtctcgttgtcatctgtacaaaagtaatccttgtattgggtttgttattttctattttatatcaaattagttttataataattgtgctactgactctgtctgagcatgcctatttgttctagttatgtgtttattctgtcttctatcctgttatcctgtttcttcttttatttgcttgtcttgctttgctactttcgttgaagcaacatctagtagaaacagtttaagcttatcccctactaggtttcaaataaatgagactcagactatggttattttattttgctttgacaattattgggggctaacccctaatctattcttcttaactgcagcttgggtaccttcccagcagtataccccaaatacttgttgtttctcctggccatgtgctcatggtccatctcccctcatggtggcttcctcattttcttccattcttcctctttcctctctggcctctcctcattccatcaagtaactcaccttcctctagtccctccagtaattggctatagccaattttatgtaaccaatagtattaaattaagggacaaggttcccacaatcaaagcttgtaaatgtgagaactcactcataggcctagactttggggtacaaaatttagcattacaatatatagcaagagatcaaacctcaacagcaacccgggcattttaataagagaaatctttcctatagatggaagtcccagtgttagggtggagagggaggaaggaggaggtgtagtgcatactcagaatcaacagacttaacaagagagaaagccatccagttgttctaatgtttcagccttaaaacctgaaagagtgatataaaaataagaaaatatgaatagaagaaattatggtggcctttgcctccatacattggctactctgtgaattccagaaaacactatcatatcccctaaagccataatccaatcactcttcttggcatctcactgctcaaagcagaacccagtgactgactccatgatgctcaataggtgtggaaatacttgtaacataatttgaaagaaataagcttaataaagaattttatggttgttacaatggaattgcttacagttatttgaaaactatcataatatctatctctaaataggtatgatagtattttaaggcagatggaagagatttactaagtattttgagtgtccagagccctgccaactgtggtcctttccctgttatttgctttcttctctacaatcgtttgtacttccccacccacagatttgactataaaccaccaagtcagctatatagtctacactgatgttcattagaataatcccacaacaaagctatatgaaacaccttaaaatagttataataatatgttcaaacgtaactttttgttttaaacaaaaagaattttcctgatattctttctactttggtaaaatcataaaatacaaaccattctttaaattttgcttctcatgaagaaagtgtgtgtagttgcctaatgatgatgttgtattgtgctttttttttcatgcagatttatgatgggtttgacattcattcccgtctgattggcacttactgtggtacccaaagagaatcctttagctccagcagaaactctctgacattccagttttcttctgactcttccaagtcaggaaggggattccttctggagtggtttgcagtagatgtttctaatgtaaccctgcccaccattgctccaggtgtgtttggcaatatagtggaatttttttctaggaatggtgtgtgatatgttgtgttgtgttgtgtatgtttgtgcacttgcaggccagaagagagattgagtttcctgaagatcgaggtggttgtgagctgcatgatgtagatattgggaatagaactagggtctcttggaagagcaggacatgcttttaactgtgtattattctcaatcccaatgtgcagcccctttgaagcacttctaggacaagtgcttaaagacgttgtttttcatttcacaggagcttgtggagggtatatggtgacaggagacacccctgtcttttttttctccccgggttggcctggaccatatggtaatggtgctgactgtatatggataatttatgctcctgattctactgtggaactcaacattctctccatggacattgaagctcagctatcttgttcctatgacaagctgatcataaaagatggtaagaaacattgtagaaaccactccttaaactctgaaattactgttttatttttatactagctccatacattttgtatagaatttcatagatactataaccaagaaagccatcaaatagaataaatagctacaatgtttagagaatatagggcgagtattaaattttacctataccaaaatgtcagggattctacagagaaattctacagagaaaaaagaaggccctttgagtgagataagtctggaattccagactgtgctaaatttttgatacaatgaaaatagtcattgatatttgtacctatagctttaagatacaagtgaaagaccaaaaagtatccaaggcaggtaatatatccatttctcattatcccgagaatctgtggatagaatagatagaactgagaatgttgtagtgtttctatacaatgaaaaaggggcatgaatgagactatacaatataggtacaattgcccttcacactctgtatgggttaagtacaaaagggcaccaggaaggccacatcctccatatcagtgtttctcagtggatcccagaacagcaatgttagcatcacctgaaaatttgatgtgaatggagattttttttttaaaaaaagcaaagctgtttcactataatattcaagaagttgctttcttaggatcccatctctatcaaaactcccagcaagaaacatcactttgtagagactcatctccccatctgtagaaggcactaagaagccctcaatcaatcatgccaacatgatgtgatcataaaccttttgtcctgtgaacaactagctttcagctcatgtacagaatacctccccttttcaagacatccctggagacactaaattttatttttatagtgtaattcaatggatgcatcctgttacacacaattctgagtgtccacaatagagtggaaatcatttagaaatcttcaggagggagtggaatcaatggagtagcttgcttgttctctaaaatcaccatctactgacttgccttttgtccttttagtaaattgccttggaaggctggactctgaggtgtattccctttcttctaaatgactttcacagcctgtcttatcatctgagaaagagataaatgctgctcttggggctcctcctcctcctcctccagcgtccttttgagtatctgaaaaagcagtaaatgtaagattctaacaaaagtctgagacttttaaagacagataattcagaatcctttcagccttattttatttatttaagtatacacagctgacacattttatccattttcttgctcatagggcaagttgaaagagctcagaaattgtgccttgtgccaaaacaacaaaagcattttatattgctagggtgacaagtggatatgggtcctttttatttgcagccatgaatagatggcttatagcttccttccttctacatctcttggattgttcaaaaaagcctgggttgagtgcttctgtcaattgctgggtgttttgaaaattttgtccactcacattatgttaaaattctttgaaattaaaatttactcattattttatttatttagattttttgacccacttgttattttgcttctgattagtagacatgcatggcattctgaagcaaatatctaaagttcattgaccacaaaacagtcagacagatgtcatgtgcaattggtcagtcctcataggtccttggcacttggccatagtgtggctgtgaccattcttgagcagcccaggaagcagcaatcttgggaaatatgtcagagccagcctcccatctaggattccttttttaattatttaaaaccaaataattcttttcagtcaatacatatcaaattttatatactacacatactgccgagatctcatagaactatcctgagcatagatgtatttttgaaagaagagaaagtaagagaaaagaagagaaagaataaatggagggagaaaaggaagaagaacagagaggcaggtggaaattatttgtgaagtcagtaactctggactgggatatagctcacttcataggttacttacaatccccatactcaggaagggtcaaaagttccaggcatcctctgctacttggtgtgttcacagtgagcctggaatactcaagaccttgtttcaaaagcaaaagtaaatcaatcagcaatttcttttttgtagtcctgtcagacatatcatcatgtacatcatgtagaggaagtgtggagtatctagagttaatctaccagggttacagtcattgttgacttctgtgcccttgaatatgataaccaaacttgtatccctctcaagattctttttctaagtattataataatacctaccctacaatgttttgtggaaaaaaaaaacaattagaaaccaagtgtaaggcacatatgagggttaataggttttcataatcttagtacctgtttcacatctcctagacagttgggctagcctgaggaatcatcatcctgtcttctagaccagatactaatggttaccagacttcctaaccctttagatatggcttctaggtctaaaattgccatattaaatatttggaaatttaccagagttaagtttggagactagaaagatgagcgaagaatgaactattttataagcattgagttatataacaattaaggaatgaactaaacaagcaatcatatagggctaagcattgcttcacccaacaggttggagtagtacctagaaaataaataaaattaataggtcaagcccaggcttgctgagaagtagaacacgcattgatatgaatgaaccaaaattttgtagcttttataagtacagaaaaagtcatcaaaaatactatatgaaatgtacattaaaatagtgtaacaaagtcaacaagtgagaaaataatttaagaaataaatttcatttataaaaaagcatgagtttacagggatggaagatacctaaattaataaagtgcctgcaactataaacacctaagatctcagtagccctgtaaagaagctgggtgcagtggtgcaacactgtaattctgaagaagctgggtgcagtggtgtagcactgtaatcctgaagaagctgggtgcagtggtgcaacactgtaattctgaagaagctgggtgcagtggtgcaacactgtaatcctgaagaagctgggtgcagtggtgtagcactgtaatcctgaagaagctgggtgcagtggtgtaacactgtaatcctgaagaagctgggtgcagtggtgtagcactgtaattctgaagaagctgggtgcagtggtgtaacactgtaatcctgaagaagctgggtgcagtggtgcaacactgtaatcctgaagaagctgggtgcagaggtgtagcactgtaatcctgaagaagctgggtgcagtggtgtagcactgtaatcctgaagaagctgggtgcagtggtgcaacactgtaattctgaagaagctgggtgcagtggtgtagcactgtaatcctgaagaagctgggtgcagtggtgcaacactgtaattctgaagaagctgggtgcagtggtgcaacactgtaattctgaagaagctgggtgcagcggtgtagcactgtaatcctgaagaagctgggtgcagtggtgtaacactgtaatcctgaagaagctgggtgcagtggtgtagcactgtaatcctgaagaagctgggtgtagtggtgtagcactgtaatcctgaaaaagctgggtgcactggtgtaacactgtaatcctgaagaagctgggtgcagaggtgtagcactgtaatcctgaagaagctgggtgcagtgatgtagcactgtaatcctggagctgagcaagcagaggcggctggctctctgggcaaccagagaccaagtcactgggaaaagacttggtctctaaaggcaaagtgaactgttcttcctgaggaagaactatgcgcacacatgcatgcacacctatatacaaaaaaacttaaataaatagatacacacacacacacacagagaaggaaaagtgcacatatacagatgtaagacactgaagaattctgttccaagcttcttgaaaaacttcatatttataactgccagggtattgataattacatggaaaacagaaactgacttgtcagtattcaatgaatgtgtgcgcacatgcacgtgtttgtgtgtgtgtgcatctgtgtgtgtgtcatgaaaagagcatgtttcctcttgtctcaaattctatcttattttcaataagtttgaattatgtcaattttctgcctttagaagaaaacaagtatttccccaggcaaggatcctgagtctgctataatcccttttattctgctcagcttctgcctgaaatagctgatgtcccttggtgtcccttcctggggctacacttgctgggatcatcttttctcagcttccatgtaacagttgtcagtttacaacacaacaaaacaatatttaaaaagaaccccctgagtgaggaaacagtcatacaaagcttttggaccaccaggtgaatgatctctgattgtgagctcagagactgagccagcctctctctccttcagatatctgaccttcagccatcatagtaactgagatcagagcctctaacctccactcacttaaacatggtcttgatccctttccagcccatcattctgagatttagtgccaggaagacctggcaggaagttttagaaagacaggaagacttgcctcaaagatttttattgaaagggcaggcagaccatggcaagctggagccagaatgacttaaagctggctgctcctcttgttgagaacactattatctcctaggaacgtgtgtggtctgagaaaaatatgtgagcagttttggcttggctgaaaatgatggtggaatagattcttaagaccatctttttacgctgacatttcccttctttggtcacaggagacagtagattatcccagcagctggctgttctgtgtggcagaagtgttcccggacccatccgctcaactggagaatacatgtacatccgcttcacatcagatggcagtgtcaccggagcaggcttcaacgcctcctttcaaaagagtaacatggccaagcatttgcccttttattccctcctccctcccctcccccatctccctccttcatctcccttttcctcctctcccctactcacttttctctccattatttctgtcctcttctttgtaaaaaatgtctccctctgccctctttctccttcccttccctttcccccttctatcttctccagatttctcttctccctacttcttcctcttttgatcctcccctcccctcctttccccttcctgtctctccttctattccctctccttcccactctggtgttctcttttttactttctccctaatcactcacctcatcttctcatatcaaggcacaaagtataaatcaaaagacacaggcacctgctatgacatggagcccgctactaagtcctcacacaaaccagagttatctatttgtacaagagcatctcttacactgagatatctgagtggtacctctcacttccgtgagaggtgtgctcatggtagacataagaaagaaacagttctttgagaataacttttaccctagctaagggctaggcctagaagataatactcatagtttccatcaaagaaactatggatacatgctgtctccagtttaagaaataaccagtaagtaatgatacagggtacaccttcatgaaggcctcagatgaaattaatcgacttgagtgtgatttgctcttgaaatagagacttgtttagtcagaaaatgtgtgttgtatatgaaatgctctaatgcataatagcattgagatttttcaaaacttgacagcatgtgaagtctaataacttcaaaggtaagctagattgacattaaagaaattgtctgtggaattttgagaaacagtcatgtataaataacttaattttactgtgggttcttgacctaatactgcagttaatctagcatttccttcccagtatatatgtagcaatcaaaggaaaatgatctaccttatactcagtggaagcaggctgtgcaggggttatgagagtgggcttggaattagagctgaaacaaatgtctgtctctgcagtttgacttgtgtgaagtttctgctacaagctgcctagtatctgacaatgataacataaggcctgctttatcattccctttcttcaactcatgatatcaaatatagaaatagcccatcaaatatagatgacaaataggcagagagataaatggtgataggtgtgatagatagatagatagatagatagatagatagatagatggatagatagatagatataggtaaatggaaagataggtatagataggtgataggtaaatggaaagaaagaaagaaagaaagaaagaaagaaagaaagaaagaaagaaagaaagaaagaaagaggtacatggatatatagctatatagttatagatagatgataggtagatagatagacagatagatagaagatagatagatagatagatagatagatagatagatagatagatagacagacagacacacaggtgacctgcaaagccttcccattcttacacagtatgtaggtcctctctgctccctacctaacctcaccaagctactttctgagttgctcaggctacctcatccattccgagtcccagcgatgttcctctccccatcctctcaagtcttcatacagttttctggactgagcagttttcttccccatgctcacccagtctgagcccttttcccatccagatctctactcaggtctaaccccgccccccaacttcccaagccgcagaatattactccttcatttttatttattggattcacagctttttcacatagtagacatgcgtttttaacatgtcttctgcctctgtaaagtcagcctttgtgaaagtaagtgctctttcctctgtggctcagatcttaagcaccacaccacgccgtgagtgtccaacagtgtgtactgcttcagtggttgggcctctaatcatttctttcaaatttctcatctcctgcttacattttgagaagtcccctatttgggggttggggaaaagaaaagaatagaaacctcattgtcaatattatttaaatagcttacctttctttcttcctggtaaggctgtggtggatatttgcatgcagaccgagggatcattacatcccccaagtacccagacaactaccttcccaatctcaactgctcctggcacgttctggtccagagtggtctgaccatcgccgtccattttgagcagcctttccagattcaaaacagagactcttcttgcagccagggggactacttggtggtaggtcctgcgtgttattctttgtagttactatttctacagatttaatctaaaatttttagtatgaaaattgataggaattttaatcctattttacagcataaaggatgttatacaattttaatgtctttctagctaagaaatggaccagataaccactctccaccattgggaccctctggaggaaatggtcgtttctgtggaatttatactccatcaactctcttcacctcagacaatgaaatgtttattcagttcatctctgataatagtaacggtggacaaggatttaagatcagatatgaggcaaagagtttaggtaagcacttaccctgagaattatatctgtattttccctgagattgtttggcgctgggattttagaaaacaaatacaaagctttctgaggtaaaagtcacaggtgtgaagtacagctgcctgtgatctaggacttagagcacactttggacaacagctattcagcatggggcttcttaaagaatgtattattctttctactttaaaggttagcagaatgaggctttgaggtttccatgttactgtttgtttcgttttctagttaatggtgaaagtgaattttccatcggtagcaaatgaactgatttaaaagggccccggagtcctttagtttttccatgaggaaatgtctaagttaaacctagtgacagtagcatggtaagggctgggactgctctgtacagcactgctgcgtttttgctttatagggaacactaacctatggtcctattattacttatttaattattgctcatctcattatatttcagtggcaaactttatgcaaagagccttacttatgtttaattatgattgtatttgattctattgcagtgatttgttttttttttttttgtggcatttactttctaacattatttaactaaaagtcagcggagagtaagcagcagaactaaatctctacttgttcccccaaattcaatattatgtgaccttaatcccagattctcgaatatgcatcaaaaggtatattgatcttagtaaagctgtggaggtttgctgttgttgccattgctcctgctgctgttgtttgaaatcaggtccgctatagcccaaggtagcctggaatgcactgtgtagttgaaggtgaccttgagtcccttatcctcctgttttggcatcccaaacgctggaattctaagtatgtccctccatgcccaacggaaaccgtgttataatatatatgatctcaaatgtgagagaattcagaatgtcatttcttcacctggaaaaaggaaacaaaaacctctattaatcaattattccccaaaccacttattggcttgagcaaggcccaagataagcagtgtgtttagtcacctcttagtgcattgaactcaggccctcaggagctgttagcagctctgagggcagctgtctgtgccactgatggagattggcaacttctctggcatccctgtcctcatgctggcatccacagtgactttgaacaggctggtttgccctccttcaagacccactttcctactttgttaatgcctggatcaatcttaactcagtgatagttcagatgtacctaagtatattttctttttagttcctttctaggcccaccagtcatgcatggccactatcatctctctgtcttttctcacacatatgactacccttaatattaaaatcaaacaaaggttttttgattttataagctatcttagggcagccataagcaatatgattgtgcttatctcttctttcttgctaagcaagacttctccctggatctcttcctttggtatctacctcataccatttccatgtcttcaattatcttctgagtgaatagctcttggcatcacttgctgagctttataccatatttctttctgactatagctgattgagatttctgtggtcctgtgctagatgtcttctattctattggcttgttaattagttaggtaaacatttataaagaactttatactacacccactaccttcttttttaaaaaaattttattaggtattttcttcatttacatttccagtgctatcccaaaagtcccccataccctccccccccaactcccctacccacccactcccacttcttggccctggcattcccctgtactggggaatataaagtttgcacgaccaatgagcctcataatcagcctccaaacgctgacaccattgcatacactagcaagattttgctgacaggaccctgatatagctgtctcttgtgagactatgccggggcctagcaaaaacagaagtggatgctcacagtcagctattggatgggttacacggcccccaatggaggagctagagaaagcacccactaccttctttaaaagcatccctctggacatcatctatctctcttatctatctatctatctctctatctctctatctatctatctatctatctatctatctatctatctatctatctctaatacctatcatctatctgtctgtctatctctatctctcttacctctgtcttattcattctgtcttgttcattctctctttctcctggtctgtctgtctgtctgcctgtctgtctctatatctctctcatgaccctactccgagactgccttttgctctattccctcccccaataaacctcttgccttagatctgttgtgtggcatggtagctgcacaccttggccccagatcctttctgactttaccccgacaaacacagtaacactatcatgaagcttttgtagtaccagcacaaaagaaagtcataggtcaaggcacttttcaaatgcattgctggacacaataggcaaatagtttataataaagcaaggacatctctattggcctttgatgctaatgatgacattcttagccattgggtttaaagctagggatctattagtatatatcacaaggatttacctaatagtcatgaaaatggatgctagatcaaacacattggaacaacaaaggactattaaggaaagctaaatatagcccaagactgcaacaatcctttctataatcctgaaagttctaatcagttaattctccttgtagaacatcagctcacatgttcatgtgttgctgaaatatgctttgtacaatcatcattttgttagctttaatgaaaaaaaatccaccggaatagataatttggatatcagcatggtgctaagtgtttataatcctagctcatgggaggtagctgtaagaggattaacaattcaaggtagcctcaataacatagaccagtgaggctcatccaaggctgcctcaaaaacaaacaaacaaacaaacaaacaaacaaacaaacaggctggagagatgggtagtggttaagaaaattagctacactggctgcttttcgagacccaggtttaattcctagcactcatttggcagctcacatctgtctataactccatttctaagggattggatgctttcttctgacctcaaatggcactagacatgcatgtggtgcacagacatacatgtaggcaaaacactcatacaagtaaggtaaaagtaaaattaagttaaaaagtaaaataaaattaaaaacaaacaagcaaacaacactcccctcctacacacacattttaaagcgaagcacctgacctaacaaaaggcagaacagatttatttgacagaataaaaaaggacatacatggtagctccttttcttaggaaattcaggatttatttgcttaaaaagaacatgaagataattctgatgaaaggaagttgggagggaaaatacagaaaaagtgatggtagagactgtggtagctatgtcctcattcaccagactgcagattgatttgattgtttcttgacagcctgcgggggtactatctacatccatgatgctaactctgatggatacgtgacctcccccaactaccctgccaattatccccagcatgctgaatgcatttggatcttagaggcaccttcagggagaagcatacagctccaatttgaagatcaattcaatattgaagaaacacccaagtaggtcacctccattttaatgttcctccaacccaaagttaatatttttttaactgtcatgtctcaagacagtttatttcctctctgctcagcagtacctgctgcccagaaaaatgtagggacaaagagatgagttaatgcctgaagcctcaaagccttgcctgatagctgttgccaccagctacatagattatgtgtgcaggtttctgtcttcaccctcaacacatcctccaagaaacactgggagtgatggtttgagatttatgtcatttgttcttcctctcacaggaaaaatacaatctctcttagatgagagtattttcggtctagctgcatattccgtgtcacagatgataaatgtatctgcttaacaaataagaattcgtgtggtggggccatagaggccaccagtgcccccaaacaggactgaagcaatcactctgcaatgtcccagtcttggttgcatcaggattcttgaaagatcatgattcacacagcatgtgtgactgtgctgaaaaccaaggaaactacatagtctgtgaaaccaaagcaaaactaaaagccgaagctcacatctatattatcttctttatcacttgtctgaaacatccctgtatttgtgtgaatagatgatggcacagcagagcttctgctcagcaggttttgataccaaatatgatatgataccaaataagtatggatggtctggttcaacttcattaggaaacattagtaaaggcttgtcctctaatagtcacagtcatggaacttctaagagaggttgatctttcgcctatggagtatattcaattatcatgtctgacaaattctactctagctaaatccatagttcatctgaaatgacttttatgtttctaaggcaaacacagaacaaggaaggaactatctccaaaggtaaacgctgtctgcatcagtcattcatggatagatgtattgtcattagacaaatgtatgacatttaaaaacacctggaagctttatgagactcactcatgttctcttatcatccagaaatgataattaagtaatgtccttaaagaaagaagtcttttattaacaaaataagtaaaaaaaagaacagtttttaaaagtttgatcatttctttctgctagctgttctgcaagctatcttgagttgcgtgatggagccaactcaaatgcacctgtgctttccaaattgtgtgggcacactttgcctcgaaactgggtatcctcaagaggactaatgtacttgaaatttcatactgaaggtggttccggctacatggggttcaaggctaagtattctataggtaatacatatatttttttaatcaggaaagaagtgattcaggggagcactacaggtttgactaggggagcactacaggtttgactaggggagcactacaggtttgactacaccataccttccatctgcctactttaagattaggacgaagaatgccatgtattaacgcacaaagttgctaccaattttgttattttatattatgctaaatgcaatttttactaaaacattagtattgtatattgtccatttgtgtataaaagtattttcagttgtatcaattttttgtttcattctcttaccatgaaataattacaatatacttacaaatgataaaattccttagtgatacaacaactcatttgagtaacgacttggaatattgtacagcatccatagaatggtcagaccttttccttctgaatctccaatgccaagccagtcattcaatgaaaagcacattgttcccttggagtttgattcctttattttaaaaaaaatgagctataaacagataatattgaagatttgctccaagtatataataccacatattgcatataatttagtgtctcatgggtctgaacactctcaaaacaaatatacaaatcagcaaaaattcagaaagtctagtttaacagtatgtaatctatacagtttaccttttagccaaagttaaattgtacataggttaatctagctatcacatccatatgataaacaataatgtaatagtattttcaagccctaatagagtatttactaaaatgcaatgtgtacttagtagttaatctagagtggtagatatttgcttttgccagccaaccactgtgcccactccagaggagtgtggaccgtgtttgggatcatcatcagaagctaccaagccttcccattctgccagttgcttcctggatggaatttacatacaagcaatagctcttacatcctgcccctagagaatgaatgtggcattacagaatatgacattccacagttgtcttccatttcccattactagataggcttacggtatctttctttccacccataacagattccaaataattaggaaaactttaatcaacattttcagattgtacaacttctttcaatattcactaggctcctaaaagttttaaattatcctggattaatcagaaaaagaattcataatagaatataatttgtgtatgtgtgtgtgtttgtgtatgttgtagtttcgtgcggaggaactgtctcaggggacagtggggtcatcgagagcgttggttacccaacccgtctatatgcaaacaacgtgttttgtcagtggcatatccaaggcctcccaggacactatctcactatccgttttgaagattttaaccttcagagctcccctggttgtgcaaaagactttgtggagatctgggagaatcatacctctggtcagtgaagtactgctttctttttttttttttcattttttttattaggtatttagctcatttacatttccaatgctataccaaaagtcccccatacctccccctactcccctacccacccactccccctttttggccctggcattcccctgtactggggcatataaagtttgcaagtccaatggacctctctttgcagtgatggccgactaggccatcttttgatacatatgcagctagagacaagaggtggaacaacaatatgaactaagaaatactgctttctttgtgggtgtttacttcttaatttatccagtctcagaagcatcttcacttctgataaaggcaaaagtttgactgatatctttgaaatgtagatttcatgggctctgggcaagatcagtagttgttctctttatgattctagtggatcacaatggatgctcagtatcccagtagccattctatggccatcttggagagcacactgaaagagccttgcattgagaaggcatcctcttcctatggagacctctcagtgccacatgtggatactggaggagcctcctgaaacataagtagagggaagggcagtggatcccatgttacagtagaagaggcacttggatcatttctttaaccatgtgagcaagccttcctcaactggctgagatagatttaccctaattggttcccctatttatacatctgcatatatttgaatatattgatgtttgttcatgattttctcagcagtggttgccatttcttcattgacaaaagatggcctcataaatttggttttctttgtccatgcaaaacagtttaagtaaagattaacaaaaaatcaatcacccaggcatatgcataactaattatttgactcttacaggtattttgctggggagatactgtggaaactccattcctagcagtgttgacacttctagcaatgttgcttcaatcaggtttgtcacagatggctctgtcactgactcaggatttaggctgcaatttaagtccagcagagaaggtaagttcaatgacttgttagaagtggtactgatctgttacacaggatatacactatgcatggtactctcatggcaatgatgtgaaaaagaaaatgtgatgctctcttcttggctcttacaagataaaaggcaatgctaataaacactcaccaactaatgaaaagttgccactcggaataaaagccaaaaggaagtaacatgtatcatgggagctgcagagagccttgcctgcaaggcccattttgaaaacaatagtccattataatgccctagagctatcaagaactcacattcctaaatgccctgacagaccagggtcaaataaaaatcttgtctaaaatacatagtaatgattttagttttcctaagtttgctatgtttttttgtcttttatatatattctgggccctgataattatttaaatgttgccagtgaactgttttctatggaagaaaatgttaaatattgatagagacaagagttgaataccaatatagatataagaagtcaagattgaatatagatgagcactctcatacatgtggaaacaaaaattatgaccaataactttttctagatgggtcattaaaaactaattttaaatgcagaaagatattttgactaaatgcttttctttctgtctttcagtgtgtggtggggatttacatggccctactggcacatttacttctcccaactacccaaacccaaatcctcatcccaggatctgtgagtggacgatcaatgtacacgaaggaaggcagattatcctcacttttaccaatttgaggctaagtacccagcaatcctgcaacactgagcacctcattgtaagtgttccctggaggctgggctctgtgttctattgagtatgggatgtgttcacacagacgtggtagtatgaaaactcagtcaaactattaccacctatgcaaattcacacaaattcagagtattttagacagaaggaaatcaccataaacttctttcagagactgacatcaataattgcatgcacccaggttatatgttggtttagttttcagaacaaagcattattttttatatttatatatttattatttattggttattttattatttacatttcaaatgtcatcccctttctcagtttcccctccaaaaactccctctcccatatcccctcccccttgcttctatgagggtgctcccccacccctacctcctctctgctcctgtgacccagccaccctaatctctcttctgtcccttgattatgtgcagtgctccaacatcatgccttaactgctgatatgacctccatctagactgtccctcccaagatggctgcctagttatcttttcatgtcccttagacctccactctagtgactgacccccaccacctcattataggaccctaaatgaagcaagccccccttgacctgttccttcatgtgttgtcatttcacagtacttcacaccagcttactgagagcgagaactagtttcctttggtgaatcctagtggtctatattcttggagataagggtttgatgaatgaattggggaaataacatgattacctttttttaaaaaaaaaagctatttttgttgtcagtttagttgtctgctgctcaatccgaaatcccaaattaatgtttgcaatttattttgacatcccatgacatcccctcatcacttgcaagtacctcaacatggccttatttagctttccgattattgtctcaggtctagtatctgaagtactgaaatgtttcccccagatactcagtatagaaccactgtggttttcttacatttgagagccagagaatgctgggtgatgttcctgttttctcttttcctcctccttcttaatgcaactactctgggactctaatcccttctaagcatttacattattgtttctagctaacatttcctattttgcacctctttagttcgttttgggtctcatctagccatgtcccactataaaaactgagaaattagcttcctcccttgagaagtgcacacagggaattcagagtacacatattctgtccacttccctgtttcagtcacacatgtcacagtttccatgattggtccacttgggtgattgtggaaactacattcaggctaagccaggcagtatgctgtgcccacgtttccatttgctttttcaaataacaataacagttgtactatttttagattctatagatgttagtcacgaatttttctacatatcttccatcaaagacatgcatgtctatttttgtcaccagtatccctgtccatctgcagcaagccatctgggaaccattgttttgggattttcctgccccattgtgtctgtagtctcttcattgcattctggactggccagctggctccatgatgctgtacatttcctttcttagtcaatttcctgttttcactgaggtacatgctcttgtaactctctaaggacacgaatatgtacagcaacctttgagtacctataagatttctgctttactagaatcatttgaatgtacatatttaaactattatagaatcataatttgaagtttcatgtagtttctttcagtttgcatctctatttacattggtctctgaatttcacattggatgtttccttagagtcctggttgttcttcattcacgttttaaaaatctgtgaaaaagctgattgggagctctgtgtacatgcctgagcctggaaactggcatttgtggaagtacctaagacagacctttacttatatttattttcaaatatcatggcttcagatcttttctcacggggaggatgaaactccatcaaggaatcattttgggaattcatttctgtaggaggttgtttaaattccattttttaaatcatttttatgcattggtgtttactttcctcctctacactccaaacaagtgcaggaattagtgtttacccaccctctgtgtacttgaatgcttgtccgaaaagagggaaacaaagcccaagatctacaggcagcatggctgagctctgagcatcctgttacttgctgaacaccacacccagctggactgtgtttgaaattcctacaaacccagcaaccaatctgatggccaagatggaggaaaggaaaggctgcaccacacagcatatggggtcatgagacaaatgtccaaatttgttccacgtcatagcaattcttaaatattgactgccatgtgtctgctcccatcttatgtcttctgaggcttgtagtttctgactacagaagatcttaggagatatgaggtcacactctggttgcttctaaacacagaaagaagtccatacactaactggttgactgcacatggtttactcattacaattctatgctacccctacctaaagatgcagaaagaggcagtagagaccattgttcattgcctccaacacagccttgttgcttataaattcttttgattctgagaacacattacccattcttgtttatagtagcatgaaatatgcattgtcttctcttgctttgccttgtgggaaatttggatccaaattcaattattcctagttcttggattttaacagactgtaaatctttgtagtgtactgtctgcatttggaaaacggagtcctactgaaaaaccaagtaggtaattagcagagtctgggttcgtatctgcacaagaagtgatggggacatttcctgtgttcctgtaactagaaggcattttaaaccagaaaccaccaagcagctgagttcagtcattaattactgtaaatgaaaatgcttgcatccctgggagtacagcatgtcctacttcaaccaagcttttagtgctattatatccaatagtgatccattcaaatcctttttaaaaataggaatatcaatcaccaagtgagttgctatttatttcttagaattgtttctgcattctgaaaagtgttcacaagccttgtgcagaagcactcactcttcactagtcataactcaagcaattaattgtattttgatgccagtaataacacagtttttaaaagccagatgagtatgagcacacaaattggttgtccagcaccaaacagaatgtcctgaaaacatatacaaggaacgttatacagactcaacgagtgatatttaagaatgtatacatacatacatacatacatatatgcatgcaataacaattagtaaagaaaaaggaggccatgaaaatggggagttgggagggctctaagagagggttcacagggccaaagaggaggaagaactgttataattctattataatctcaaatacaaaaagttaagtcaaatgattaagaatgtagaagctttaaatccataaataattaagaaagagccattatagttacacaaaaatagattttttttccttaagttacttttcaaggagcactggctcagtggttaagaacatgtaccaattttgcagaggatggagctaagctcccagtacacacattggacatagcgacaactgttgctccagctccaggtaatcccaatgtctctggcctcctggcctcctggcctccgcaagcacctgtgttgacatgcacatggccataccaagatacgcacaagcacacctaattaaaagcagcaaagtaaaaccacttaacagtacttttcaaggtatttagaatgactacatacacttggaatagcctaatactaacattttcatttcatgtgttacagcttccaaggcacaactaagaaaatccacagagtctgtgaactctgtgaagtataaagaaggctatgccggggcctagcaaacatagaagtggatgctcacagtcagctagtggatgggtcacatggcccccaatggaagagctagagaaagtacccaaagagctaaggggaactgcaaccctataggtggaacaacaatatgaactaaccagtacccaggagctcttgtctctagctgcatatgtatcaaaagatggcctaatcagccatcactggaaagagaggccctttggactaacaaactttatatgccccagtacaggggaacgccagggccaaaaagggggagtgggagggtaggggatcgggggggggtgagtatgggggacttttgggatagaattggaaatgtaaacgaggaaaatacctaatataaaaaataaatttaaaaaaaaaagaaggcacagtggcatgtttacctcagacatagagcagggtctccacttgcaaactgtgcagcagcctctccctgtcacacataagaggaggacatacttccaattttttcatttgctcaacattgattctaaggctgaaaataacactcagtgtggctctgtggcttgtggtcctgggagaggtgtctgtgtaccaagtgactatggtctctttagaaggacatgagtctgggctgagaatgctcatcccctgagggatgttcagtaaggtgggcagcatagctacaagtcaaactatttttctaacaggtattcaatggcattagaaacaactctccccgactacagaaactgtgcagccgtgtgaatgtgaccaatgagttcaaatcttcaggaaacacgatgaaagtgatatttttcactgatggctcccggccatatggaggcttcactgcttcctacacctccagtgaagatgcaggtaatgtaggatgctgcaaactcacctcctctgggtcagactcattcagtatccccataaacactaccccaagcagccaagccttttgttttctctgtagtgatcaaaagtatacccacaatcttcaacacaagagcaacatctaccacaaatagaacatctgtttgggggatacaggatcagggaggaggagaaatcattgtagtttcaggggggaaacccttgcattttgattttttaaaaaaaatatttatttatttatttatttatttattcattcacttatttatttatttatttattgtatatgcatatgctgttgttcgcttcagacacaccagaagagggcattggatcccattacagatggttgtgaaccaccatgtggttattgggagttgacctcaggacctctggaagtgctcttaaccactgagctgtttctccagtcattgacttttatttttttacaacaaaagtttattagattattttctagcacgattccatgtaaagacactgctaggagtgactctgaacccaccctagctgattcattattttgtgttagagaaaacatttatcttctagttaacttattaccaaagattaattaatttcaaacaaaactgaatacacgtcattatttttgttcatctgcttatatgtatattttcagtgaaaataataaaggggttgcatttaatacagattatccccaaattaagcaacatgcagcctggatttaaagtctcctcttccttttagggctgctggtattttctaagggttttatatctcaggaagaatgaaaataaacacatctttacatttttaaaatttattttattggtataacagacatttgttaccatattaaaaatagtgggtttgtcaacactttagtgttacagtatctatttgatgcagataaattgttgaaccaaatgggaaattgttcatgaaaagccactaggacctagcagcagtttgtgtatttttctaaattatgtattaaatgagtaatatgtccagttttggagaaactgatgcacagtcaaaccacagccatcttcaccattccagaagggaaataaaggaactttgtcttgtgtatttttccttcataaacccaaaggcatttctcctatagtttttatgttctactagcctgactacacctagaagagccaatcaacacgtttattctgtcactcattgtgcctcgattgttggagttgtctgttataacatggctcttactgctttttctctgccttttgttgccttagtgtgtggtggaactcttccaagtgtctctggtggaaacttttcttctcctggctataatggaatccgtgattacgcgagaaatctagactgtgaatggactctcagtaatccaaatcgggaaaattcatccataagtatccattttctaggactttccctcgaaagtcatcaagactgtacatttgatgtcctcgagtttcgagtaggttagttcaatgaaataacacgctttctcatttatgtgcatagtcttcttattcttggacaacagcaggagtcaaatggctactatttcagtacagaagatacaaaggagctttgtcagtacaatgctgaaatcctgtgttcccatataggaagcatgacctatgaactatgagtgaagcaggtccttagcaaggaaagcctcctgtctcaggtttcctgtatgggaggttcactcgagtttggttctggagagtctctgtcttatcagtgtgctccactggtcctacgagactaagctcagtgtggtcagactgccagtagttcccagaaccagaaggattcacagaaggtggttcaattctttttaggccttagaagtttaaaaaccctccacagcataccaatgaagagaagcacatggggctatttgggaaattatcctcaaagacatctttcatctttttttcatgatacaaaaggatcaaggcatcactgatgaaccaagcttctcctaagatttaaaaacaaaaacaaaaacacaactctgtgttcatgaacagttgattctagctctttcttacagttcaggcatagttgatctaactctgctgtccccattgtcaccctgttgacataagtatgttcacagaacataagtatgtagacaacagatgaagaaagtattataggtgacctatactgtcaaatgatggttgcattctccttaatccccaattctaaagaaaagaaggatgaaagcaaaatggggcagacagctgtaataatcagtagtggctgcctgtttttattattgtcatttggttattgttaacatcttttattttaggggagttatttttcaaagacctcccataaacttttggatggtagagactaggataaaatacagaggagataaacagtcttaatgtgactatgtaaatgctattaaatagcaagttagaatcatttgtgtctatgcagaaagtaatattttaatatcatatgtagtgtttataatattgtagtgttgtcaggctatgtagcaagtttaagaaatcaaaaaggttaaagaatgtatttcacctctaaaaatttaaagataatttccattcagccttcatagcagccccacaccaaggccaaaattgagaagacctgtccagttagttacccatggtcccttttgagaacatagaagacagagtttttattaagggctttgatatgatatgatgtggtaacagatcagggatttttgcaagagaattctcccagctctctgaggcaaatgcgtctgaaagtggccatggccgttagagaatgctctccatgaaatgccataccattcatggaaataaggagaatggctgtatattcaattttagtcggttacattcaatttcctctttattcctcctgatttacagacagatagtagaaatactcttccattgatttataaggtcaggggtgttcttctgacaggataaattgggagcagataaatatgcactctccaggaactctgcaaatattaatcatatttccgtgagaagcgattgtcatgaaacctattcaactccgcactgacaggtcttggcctatgtgccaagtgttctgttcatgttagatgatcaaaggcaaagaagactcttaagcagcttaggcaattatcacctctctcctaagagcatacttatttattatcactgtcagcattacatttcttcctcctttacaaagcacacagctgaagggagtattaagttggtttcaactctgcttagatatgtgaaagtatgtatgaagacccaagctggaacaaactggcactgataataaaggtgtttctacatccaaacaacatgtctgagaactctgtccagtgcaattggcaatgattatataggaatttttttaaatgcctgctactgtaccaggattgaaataaatcaagaagtgctttttcttattgttattatttggtcctgttaatttaagatatttgtccaaaccctgtaaccatgtcacttgctatactgttttgttcaggtaatgctgatggacccctaatagagaagttttgcagcctgtcagcaccaagagtgcccttggtcatcccctaccctcaggtgtggatacattttgtcagcaatgaacgtgtagaatatactggattctacgtagagtattcctttacaagtaagctctgaaacataccacatatagatatatagatttacatctaggtatataatggtttcatttttaatttcaatgaaaatttccaggttaaatttttaaccagttgttactgataccaagaaaagaattttatggttttttatatattttcctttattctggagaccccactatattcttatggttttaatactttgattctcgttcatttctttgtgtagacaattctgtcttcttcaaactgctttcttttcattttgttttatatggtttggtttagttcctaagtttggtcaacttgcattgacatattttctcttgtaaaccaatcttgaattttaggataaattctacatggtcacagtttatgttttattcagattactgaatattacttataatttgtgttggatatacatgtgtgatattcagagtttatatgtagaagttcaatcccaggtaggtaacacaacttcttgtcttggttcacagatgatttttttttctggcccctttcactaacatggtaattctctcagatttgtgaaaatgttcccttgtgtgaaagtctgaagttatacctcctgtatctgccttgtctccagaacattagttcccaccctaagcccatgtcttgggtttgttttttctatttatgtatgtatgtatgtatgtatgtatgtatgtatgtatgtatgtatctaatgtatatgagtatgctgtagctgtcttcagacacaccagaacaaggcattggatcccattacagatggttgtgagccaccatgtggctgttggtaattgaattcagggcgtctggaagagtagtcagtgctcttaatagctgagccatctctgcagccccccatgtcttagtcttaactgtcttagtcagccacactttctgtttggcactgctcctctgtgtttgagtgcatttcttgtttacagatttttagaaacccactcttctctctgttgagtttgactgtgatcaacatgttttgctatagttttgtatattgttatctgtgttataacaaaattcatggttgaaggagggaataagctcaaacataatattcatgggcaaacctttcatccatctgttgtttttcatcctattggaagaagaattgggcaaagaaacaatgttgtttatattgaacagcagatcatatgattatacagacctgtaccatcttttcaacctgctataattatctaccctttgaaacccaagcacttgttatgaaatgatgatatatttgattgtggggcagatcatttcttcagggtacctatagtctcacggtctggtgttctcaagaaaagtaatgttatttatactttctatagcacattcttagctacataatatggataattagtctccatatacagtaaagacaatctcctttatcctgttaagttgaggctctctttactgtggaaatctgtttgatgtacaccatttgggagtcagttcatttgctcctgttctagccaactttgatcttgctcaggtttgggttcatgattgattgcttgactgatcatatttttaccagaaagtttgataataataattaagaattgtgtcagctctgtgagatttttcttctctcttattagaggtttataaatctaatttcagactgtggtggaatacagacaggtgagaatggagtgatctcaagtcctaactatccaaacttgtacagcagatggacccaatgttcatggctactagaagccccagaaggacataccatcactgtgagttcttacaactgggttaaatgttgacaggactgaatcagggaaatggtgtgtgtgtgtgtgtgtgtgtgtgtgtgtgtgtgtgtgtgtgtgtgtgtgtatgtgtgtgtgtgtgtgtgcatgagtgtgttgtgaaagtacatgtatatgtaagtgtgcaagagtgtataagagtgtgagtgtgtgagtgtatgtgtgagtgagtgggtgtgtgcatgcatgtgcatgtgtgtatgagtgtatgtgtatgtgagtgtgtgtgaatgggtaagagtgtaagtgtatatgtatttatgagtgtgtgagagtatatgtatttatgagtgtgtgagagtagaagagtgttaaagaatgtgagtgtatgagtgtatatgtgtgtgatatgaatgtgtgtatgagtgtatgtttatgtgagtgtgtgtgaatgcatagattgtgagtgtatgtgtggttatgagtgtgtgtcagtgtaagaatatgtaagaatgtgagtgttttgtgtgagagttggtgtgtgcatgcatgtgcatgtgtgcgtatgtgtatgtgagtgtgtgtgaatgggtaaaagtgtgagggtatgtgtctttaagagtgtttgcaaaagtgtgtaagagtgtgtgagcatatgtgtgtgtgagagtgagtgtgtgcatgcatgccatgagtgtgtgtatgtatgtttgtacctgtatatgtaagcaaccagactttgcatttataatcaaatatatttttctataaaattctttgtttaaagtacatatttttctctacaattaatgtgaagaatgttatctttttcattactaaaaattagtagaagataatttagcctccaggaaagagatggattcagtaatgacaggagctgtcgttttagcctaaatgactgcacttcttggacaaaactaaactatttttaaatttacaagagaacttttaataaggaaaacagtgtgggcatgagagaatgaaagaaccagaaatagaaaaccatctgacttacaaggaaatcaaatcttctgtagaaaacttgctgcctggaggcagggtgactccttttagggtgactccttttagggtgactccttttagggtgactccgtttcagctcatggggactcatcatgccttttctcttctgcagctcacatttagtgactttagtgtggagaaccatccaacttgcacgtcagactcggtcactgtcaggaatggtgactcccctggatcacccatcataggacgatactgtggacagtcagtccctgggccaatacagtctggttccaaccagcttgtagtaacctttaacacaaacaatcaagggcaaagtcgtggattttatgcaacatggaacacaaacactttaggtaaaaagaaaaaatatatcttctctatacttaaccttctttttttttcagtgagacattttttttcttaactagtttaaagtatagccattcctgaagaggagtgggttccaggactccactcagtacccaaatctacgagtgctaaagtttcttgtgcaaaatgatgtagtacttgtgtgtaatgtatgaatgtcctccagaaaacattctctctctagattatttgtaatccataatatatatatgtgtgtatatatatatacacatacatatatgatgtatatagtcgcaacatatcatattgtccaggagacaatgataagagacaaacagtcttactctcagaaaacaggaaggatgttcaaagagttaagacagggtctatattatgaagagtcttgattgatgaattgccccctggagatatggcatgttaatgagtagtttgaggagatatggcatgttaatgagaagtttgagggtaaaaacagatatacttagtgttttagaataaaaataaaatctgctatggattctgaatcaaaagaagacaagggatgtgattttttaaagtagcatcgtacctatgaaatatgaatattatgaaaggtctcagaaactataggtgcttgtattggatagttatccaggatgttagtaaatcctaaccatccaaggacaattcttcatcccagagttggttaagatgaagatctctatagaatgagtccaactcctccttaaaccattagctttccctgagttcaccatagagaagaaccgttggctccagagcaaaagatcatgcaatgccccttaatttaatttcattctgttctaaattcatatttttctttgttatctcttaggtatatgttttaagcttatgaaaatcatcctagacttttctttctttatatccctacgagttattccgaactataaatgagtttcaatatgaatgagcaagactattaagtaggaggagcttctcaagttttttttttttttttttaacattttctttagttcagtgtggtaaactgaaatatcaaaggctcatagaagtgtactctcatgtgttagtgttaagaaaatgcagagtgagtgtagtctggctaccttcctactacacagtcttaaagtagaaaaggttgattgcttggagcagaatgggagcagactatctactatgatttgaaggctcagatcgaatgacttcagatgggttaagtgtgggcataccaaaatggtgatagtcatccatttaaagcccttcacataatgggctcctgcttattccatgcccccaaaatgagtcagatataagaaaagatgagttgtgatctcacatgtagaaatgttctctagccatctttggtttccaaagttgatattttatcttgaagactgatttttttttccttatggaaaatttccaggttgtggtggaacacttcactcagataatggtacaatcaaatctcctcattggcctcagacattcccagaaaacagcagatgttcctggacagctgtcactcatgaaagtaaacactgggagattagctttgacagcaatttccgaatccccagcagtgacagccagtgtcggaacagctttgtgaaggttggtgcacacctttgtttaactcgttttgtgaatggaagcattttggctatagagaactggaagacatttctcaaagagaagagggtacagttttgttgcttgaattgtttagatgtaaaatgaagaaacctcagctttagaaagtaaggtttgaaccctggagtacacactgtcctgtagccttccatctgatgatcagggcagagcaactaaattaaggacattttcctctgaccttcttaaattgtcatgagcattggtggatggtttctcctttcctttttcaattcttccttctctccttcccctccatccttgctctttctctttctgttcctatttttgtcttcctatccaaaaggaagttcagtacaaatagtatacggtttcatcacaaggcaaatttaacatatgctatgaaaattacaggaggttggagtagctaattctggacattgagagtctcaatggtaaaacaaccatgaaagaccctcttaaaaatgatggcaaacaggaaggtagacaggcagctatcctctggagcagcttctctgctcactcaacattgattggcactttccacttacatgaccataactgtattgtaagttcactttagctgtgctatcttgcatatagtctcatggggagactatgccttttagtggagagaccaataggctcaagtgccatttgcagggaatatattcatctctttcatacttaacacccacatgtatttttatgattcaatttaatattttggctctaactataaaatgaagagattgatccctacttcagtagagttgttttaaacattagaagtaatatgccataatcacataaatactacctagtactttggaatataaaagttgcctaatgaatgtaaatgtccttttaaaaatcagtgttatgatttcatattatctcccaaattgttttatattacattgatctattcttcctatttaaatgaaactctaatacttacaaaatatgcacataataaaataggtttaatatacacccctcatttgcattttcccatgaagtaagagagctctcttttcacaagacagtcaccacagtgcagaagcttcagcgaagtcttcttagtttctgaatgggaaaaagttaatctaagaaaccaacttgggatcacagaagttcctctgacagtgtcatataagcccagggccaacccaagttgagatcaattagtaatattgccaaaataagtaacagaagaaacactcttactgagtgtgagacttctcattggcaagattataactgtgttatgaagctcttttttattccaaaggatacttctgtatagatggaagtcatgagtaaaggacccagggataacaaactctgtggagtgagcaggtccttggtgactttgagtcagagtctattttctttgtagagacaataggaaaggtagagagaatggtcaaagtccaaaacccttctttgttctaaaaatcagagattctgatccccttttagggtactagtagggaaatactactcaatactttctctttgatggagaaaagcacagaggtgaaaacacatggctggaactatatagacctaggaagtattaactagtctaggtaggactgactttacatacatataaccctagcatttaaggggtagaggtatcctttcatcttcactccaaactttgtctctgaaactccttccatgggtattttgttccctgttctaaggaggaatgaaatatccacacgttcatcttccttcttcttgattttcttgtgttttgcaaattgtatcttgggtattctaagtttctgggctaatatccacttatcagtgagtgcatatctagtgactaattttgtgattgggttacctcactaaggatgatatccttcagatccatccatttgcccaagaatttcatgaattcattgtttttaatagctgagcagtactccattgtgtaaatgtaccatattttctgtatccattcctctgttgagggtcatctgggttctttccagcttctggccattataaataaggctgctatgaacatagtagagcatgtgtccttattaccagttggaacatcttctgggtatatgcccaggagaggtattgctggatcttccggtagtactatgtccaattttctgaggaaccaccagactgacttccagagtggttgtacaagcttgcaatcctaccagcaatggaggagtgttcctctttctccacatcctcgctagcatctgctgtcacctgaatttctgatcttagccattctgactggtgtgaggtggaatctcaaggttgttttgatttgcatttccctgatgactaaggatgttgaacattttttcaggtgcttctcagccatcccataatcagccaccaaacccagacactattgcatacgccagcaagattttgctgaaaggaccttgatatagctgtctcatgtgaggctatgccagtgcctggcaaatacagaagtagatgctcacaatcatctataggatggaacataggaccccccaatggaggagctagagaatgtacccaaggagctgaaggggtctacaaccctataggtggaacaacaatatgaactaaccagtaccccccagagctcatgtctctagctgcatatatagcagaagatggcctagtcagccatcattgggaagagagacccctaggtcttgcaaactttatatgccccaataaaggggaatgctagggccaagaagtgggagtgggtgcgtaagggagcagggcggagggagggtatagggaacttttgggatagcattttaagtgtaaataaagaaaatatctaattaaaaatagttcaaacccttaaaaaaaaaaaagaggtagaggcaggaggacgagggtgccaactcactcttggtgacgtaagaagtttgaggacagcctgatccatatgagacactgtctcaaaaaataaaaggaaggaaatgtaagtaacatcccagaagtcccataaaaactaaggtgaaaaaaagtataccacagatcttcagaaaatccacttcccattagaaacagagcccaggaatatgtgcaagactatgcactgaacataaaccatgacattgttctggaataaagcaaggaaataggactcatagccaactaacttaaaaaaataatatacttagatcacataaagaggatacttatttaatcttatgggctttttattgaatatagttattttcaagcctaaacatggtaaaatattgacaggtgaaaactgttagtactaagtcatattttgaccccaacaggtctgggaaggaatgttagagaccaacgatgccctgttagccacaagctgtgggaatgtggctccaagtcccattgtcacattaggaaacattttcactgctgtcttccaatctgaggagatgccagcccagggcttctctgcatccttcattagccgtaagtaatctacactgttgaggaaggatggggaatagcggaagagccacatcaagattggcttgatagggaagaaacattggaaagccaactcatgctgaaggaatatccttcctttatagttagtgagatacaggcatggctgtccatgcctgcatcttcataaggcaaaggcagggaaaattggaatgtgaaattagttcagaggttgtcatctgtgttctttctttacgtgaactatatttaatctttgataatttatcttcttaaaacattatgagatttgaagtgtattgtgtggcaaaatatctactacttagcatcctcatgatattctaaaatgtttttattttgtgcacatgttgacttagggatcaaagactccttctcttagtgctcttcttccatttgaagtctcgagtatctctagagacttcataaaatggaagtcatatctttttatgaaataggcactacagacgataatgaatatcctgatgatagtttttattctcctgtaggttgtggacgtacattcaatagctctacaggtgacatcgtctctccaaacttcccaaagcactatgacaacaacatgaactgtaactactacatagatgttgcaccacagtctctggtcatcctgacgtttgtgtcctttcatttggaaggtatattcattctttcccaaaaagtaatgttaaccaataaaaaatcatatatctacagtgttggcacagggctttaataaaggttttggtaaaggaataggttgtggctatgtgaagctagttaaaatatctactaacatatttaaaatgtcttgattgtgagaatatgtaatctattttcttagcaatattaaagtatataatgcattcttaatataatctccaggctatacagaagattttctgaagttattctttttttcacaataaggttaagtactgtgacctttgataggcatctccccttccttacatttagtaaccagtgttctgctctacaagttcagctttgttagatttcacagagaaatgggaatgtgggcagtttttctgtgtctggtttctttcgtttagcataatgcttggaaatctatccatgttgtaaccaactacaatatgtccttctttgtaaggacaggacagtattctgttgtgttctttcatctgtctgtctgtgtcattcttttgattcaccaggcaaaggacatttgggttggcttcatatcttggctattatggataatcatggaacaaacatggaaggatagatcggtcttcatttcctcggggtgtatgcccaggagtagagttactggataagatcataagtctatttttaattttttgagacagctctcttttccataatggctgaaccaatttatatgcccatgtatccaccattactgaactcttatcttttgataatatccaaggattcagtttatctcaagcaaattacaaataatcaagcagttaatgggagaaatgtaggcagagtggtctaaaacctctacttgaagataataataaacatcttctgaaatgtaatggaagtgaaaataaaattacatccttttatctccatactgaggactgaacttggggccctaatgcatgagcagcaagcactctacaaccaagctgtagctacaccctgttatgttttattgtgaaacagggtcttattaagttgtccaagctggttttgaattttgatgtaaatcaagcatgcctattactcctgcttcagtctgcagagaagctgaggccataggcctggcttccttctcttttttaaagaataccagtaccgttttatatattccatgcataactgaaaaaaatacagtaactttaaaatcataggcaccacataaattgcttaaagaagatgcatctgaagcctgttccattttaacagagcatcttacttttcaagcacaggtgattggactgagggatggatggacaccaagcttggcaagtgatctgccactaagttatctgcccaggcctatttcatttttagttttgagacagagtctggctaaactactcacattagccatgaacttgctctattgacttggttggcctcaaacttgcaaaatgcctcctcagactcccaagtagctgggattccaggcctgtgccatcaggccaggtccatagcttttaatgtattcatttgcatctattctcagtacacatgcatgtaaacacatacctacaatctctgtaaactagccaatgagagaagcgatcctacaagtcagaatgggcacccagtccatattgaataagtaagtgggtggataagattaggatctgctctactttcatgaaatagcaccatgggatatcctttcatatctgttcagtgaacattatcccccatgttcagattcctcagtggcaacgtttctaagcacacacactgctctgctcatttctcaactccaaggacagggctgtttgtccagtaaggttgctagtgtgagtaaggctatggctactactacacactaaatgtttagtgaaaacaagaatagaaatcccttcaagttggtgtgtgttttcacctactcatggtcatagtcatacttcctcacaaatcagctatttataaacttcaattaatctgtaattacactaatatgtttctgtattttcaagtcttagaggatacacacacacacaaaaaaaaaaaaatcaggcacattgacctaatattgagacgcagaatcaaatccagaattggtaatgtttcccggaattgtgtgattttcagtttaacaatcttatacatttttgctaactaaagaaaattttatagtcaatgtggttgactgaataaaacaaaccaaacacaaaacattgcatattctgtgatttcatttgtgagaatagtctagaataaagaaatcacacacagagaaagtagtctcatggggccaggaccacagttcagatagatagggattggttgccaatggacacaggtctctccataggatgctcagaatgtagaactggaaagactatcaaatctttaaagtgctgtgggagtgtcagcctttggggaaacctggaaagcactcctgcctcatctctagtaactcaaactctacaagtttgttctaacaaatgagaaacttcaaatatttttatacaatgatgcatcttttacaatatgtttagctacaagaatactgaatttattgacccaaggttcaggctttgactgaacatgaagtggtaatttttccattagaacttagtgagtacattagcaaaatgttttagagagctacctacaatgactaaagccctgaaattgatgctctgcgtgaacattggaaatgattgtcaggaaatatcaagggatttttcagattctgctcatagtcactcttacctgtatccaggttctgtgtaaaggttttcttaggagcagcaatgttgacattgtggactgcatgggtttgggggtttgtttgtttgtttgttttgtggcaggaggtctcagtatttgggtacggtcccatgtgtgttcaagcctgtttcaaagcttccctgtcctctatcccattctccaaggtgacaggcaaacttgtcttcagatatcacaacacatatcccctgggagacaagctgcctctggttgataattcctgggtaaacagaatggttctatacagaaacggaattctgggtaacaactgaatttactattatggaattctgtctgctttctcttgtctgcccatgttttgtctcttggagaaatacttcatgtggagctgaagttacacatagaaaagcatttcctaattgtgtttgtagtttctggatcagttacagaatcatagtattttgtctgcatttctgctctgacgccagttgttgtgtactctatgtagatcgctcagctgtctcgggaacctgcgattacgatggcttgcatatcatcaaaggtcacaacctctcttccactcctctcgtgaccatatgtggttctgaaaccttgcgtcccctcaccatagatggcccagtgatgctcaacttctattctgacgcatatatcacagactttgggttcaagatttcctacagagtcgccagtgagtaaccgtgctgctgtcctttggaattttcttgcattgtgtaacaaacatatgcagtttttgttattattcatcatatgtcaccaacttgaaggttaagaaacattaaggctaaatatgattaactaggcacatggtacaaaagtaggtatttttctttaaaataaacagttggaggctgcagagatgactctgtggctaaaagcactcactgctctctttcaggggacctgggtttgggttccaccactcacatggcagcttaaatgcccttttcattcctctgtgagtattatatgcatataatacagagaccagaagacatatacatatgtgcatacattttaaaatatattttttaaaaataaaataaaaattgacatttccccctgaaatttggctaaaattaccctatgaacataaaacagagaattgagattgattttgtgacagaaccttatcctacatggtcacttcagtgaaacaggcacataaaaccatccctgaatttgttctgtctttgcttaaccacatgaatggctaacggaaggaaataaagtagtttctcttcaaataaagtacttcttccatctacagagaatacaaacatgtatttctccatgaaaagagtcttatgatttgttcttagtagctggtgtctagttcctgaccctcagttactaaaaagtatgattctctgatacttttttctgcatcaacagaataaaatgcgtcttctcttatgctcttggatgaagagaaaggatttgctttattcttttagttaactaattaactaattgaataatttgtataattaagcccttgatgtatattctgctcttttagcctttagtttcctttggtatgaacatggttcaattcctttttgagtcttattttaagattatcattactactggcttcaaatcttggcaatgtgtggagatggacgttgtttgggcactgataaacattgaagaatcatgtaattaacctcaagtaaaatagagcagttgctacgcaagctgacatttaattcatgagctgtattcagggatctgaatgcataaggacttttggcacagaaaagattttgcccagtaaatggacagagttgaggcaaaaccaaataagcaaaagccttaaataacagccacaaaatttgtctaatcttggagatatgttagtagagtgtgttcattggtaaccatagaaacataatcaaaatgtacaaacatcatataattttagtatcataaaacaaataaacatgctcagaagcaaaacagcctaagttgggaatatctgatccttcctagataaaatccatgtaaaaacaataccttagtagtcatattggaacattattatcatagtgattacaattgttgattacggggtatagcaaagggctgttaatggctggagttagagcaaagagtggaccaaaactcctcatgcttcttgaacacaagccatcttccctatgaagggagcacaagtagggttctgcctgctgtctttgatcatcctcttgccatgtcatatctctgtcaacctgtgacttagagtgaagggacagacacatcccaacacacgaagtcttccttcttgttgctcttacactgtttgtcttagatttattaccttcatgtgccttaaaatattcttctacatttctcttccctggagaagtcgaatttatttataaacacagtgaaggaggtttaggtcatctgaaaaacaatcaatatgagttctgttaggagacggtaaacgatagcttagattatccccaaatgatttgcctatgttgtgagtaataagcaccctctgtacccttgtcttctgttccagactgtggtggaatctacagtggaacctatggagtccttaacagtccttccttctcatacaccaactaccccaacaatgtctactgtgtctacagtctgcaagttagaaacgacagattgatactacttcggtaagtgataccaaaaaggggggtggggctacttaagaaaacaccttcagctctgttcacaggaaagctaccttgctgacagagactatgagttctcatggtggcttagctggaatctagagaaaagcagaggggtcccacatggcagtaaagcctacaccctacacctgttccagtagagattggggtgaaaatagaagcttcaccagttaaaacagtccttgtaatttctcaacagttgtgaaggggcatcttacaatagctgtcaagttacaagcccctcttaaaaccaaagaggatataaagggttagaacaaagagttgccatttgttagacatgtcctatacatgagaagcttcgttcaacactttacttgaatgttttattgtactgttaaaactgtcaggagaaatatacatgtgtacttgtatatgtgtctcaaaaggtctcacatcttctcaaaggtaacacatatttaaatgaagaataaaaatctggattctcatttactgtctcccaaagccaatgtccgaaataacttttaccacctcttttctcctgaagataaacttaatcccataaagtttatttttatttgttaatcaaagcaactctagattgttgctttatgtgatattgccttggtttccattgctgtaaagagacaccatgaccaaggcaactcttttaaaggatagcatttaattggtgctggcaaacagtccattatcatcatggtaaggataatgcagcatggcagcatccagaccgacatggtgctggagaaggagctgagagctctacatcttgatcaaaagatagccaggagaagactaactcatgggctgctaggaggagggtctcattgcccacccccacactgatacactccctccaacaagaccacacatacaccaacaagaccacatctcctaattgtgccactccctgtgccaaacatattcaaaccattacagatatgtcacttgtaaattaactctctaattctacttattccaagcaagactgataaagaaaatgcagcccccattacccagaaatataaagtgctagttttctttctcctaagatggtttatttccatctcttcaatctcactgatacctgaaactactagcatgtgatatgaaatctgataatagtttatgagaatacagaattttctacatagaagcttgacaagctgggacaatacctactctgtcctctatttgtgacttatggtttatgaactctaaggcttacttatagtgtttgtgtgaccattttagaagaaagagacaagagactggaagaaccacaaccaaactatatgaaaccagaatttcttccacttttcttaacgtttttcctataaagaatcaaacaatactgtcactcatcatacaagaaaaaaaaggaataatatattttaggagagactgaaagtatctagcatgttattgaggtaataacatagaccatcttgtcaaacttgattttaggagctatagacaggtaagatatgctgaaagggttcaggtttctttaagatacaattgccaatgttaaaatgctaacctccatccatgctctaaatgtggtagaacacatcaaaacagggcatggaggtagtagggtgacttgatggaaacaggaaggggttcagtaggagagaagtgggtgagagacaataatgaggatggatgaggatcaaaaatatgatcaaagcacattatgtagacatggaattgtgatatctaaaaattgaaatctgttgaacataggcccagattatcttgaagcagaaaaccgtatcttattcatttttatatccccagtttctaccacagttcttagttataatagctacctaaaacatactggcttcagtccatcagtaataccttatttacaagattcccttccaagagaagcttgagtactgtgttgtcaggtttttgcattcttcttttataagaacctcagatatggtttaatgggcacaaataagacataagtagtaaccgggtaccctttacaggttcaatgattttgagattgttccctccaacctttgctcacatgattacctggaggttttcgatggtcccagcattggaaatcgatctattggaaagttctgtggttccacacttccacaagttattaagagcaccaataacagcctgaccctgctattcaagacagattcttctcaaacagcaagaggttggaaagtatctttccgggagacaataggtgagcatatgagatgtgaaagtatttttctggtgacttcttcttttgtgcttttaaaaattactcctgcccccagataaacacagttgatcttcctataaacatctaggaggcccaaacagaaggcctcattggctatggtccatttattcttcagtaaagagtcttgggaattctaagcactgactttatgactgttaaaaaaaaaaaaaaaaggagtgcttcaagaacccaatacctaggaaaagaacttagtacagaggtcttgatagaaggctttgactgccacacatggaaatcgaggtatagaaaataccaaagccctcaaaggtctttagtaggcaaaatgtatcagatgtagcatccaaagcttgatgggacactactaggggatgtaagttgagaatgaagtcttatgtgaaatttgttgaccaatgataccttagtctatattttccagaaagagtgttgtatttagtttgccatatttgtatctggcaggcctgccagacacttcagcggagatatctaggagatagctgaaaaggcatttggtctggaaatggtggtctcagagtcatgtgagatggccaggatgactaagagtggggataaactaaaaacaagagccaagctcatggtctctgtacatgaaaagataattatctacctaagattagtacaggaacacccatcatttaaaataaaaggcagctaatcaggtctctgtttgcactaattgcttcaatcgtataatttctatttgactctgcaaagtgttttgacttttccttgaatattgatgtgattaatgttctgagatctaatggatcctcaaacaaaccccatactctgagaagatgcagaaaggatgtgaggaatttgcctcaataaatcatctgggctcttatttccatactccactctgtctattcaccttcatccctgtgacctgaaaacaaagaacatttcaaacattttgttttccgtgttatgctttcctggatttatttgaaagatttatttaatgtatccatgtgcagatgactctatgcatgtgcctgtgtgagtaaatatgcacatgtgtatgcagatgtccacagaggccagagaaagaagaaggtatttggagatttggagatgcagtcattgggtatctgtgagctggaccatgttagtgctgggatccaaagtctgcttcttgagttcttatggctgagcagcaagagatcttggctgctgagccatctctccagcctccttaaaacagctctggaagggagttatcaggcagacatttatctcttataagctcctcataaattctgacaattgtatcataaagaccttttgccacctacctttcttagttgtcatgacaataacttgaaagcaggtctcataggacacagaatgaggcctcactagaatggtatatgtgaagtgacatgtaaaacacagaaggctattttaaaaggaaagcccactttcctttgaatgcttcaattttgcacagaggctctcttgtgttgggctaccactgtgcttcatacgaatagttttgccactttcccatctgtataaatgccattgtccacttgaagatgctcaagacataattcaaatgattgcatgtgcttttgggtgagaggtcaggtattataatttttaattgggtctcatgaagatattttagcccaaacaactaagtgtcctgaccagtctaagtagctttcagctttgttttgttgtttcatgtggtatgaaaagaagaagtaataaatgtagttttagggattctggaatcattcattacagacttgctaaaacataataaaaaaccaaaaggtcagacttggctaaaagcatacaccttcttttctcatctcatccatttaagccactccatcttttctataagaagataactgctctgtggaccaggctgactactcatttccaagagcatcagtctgcctggagagcaacacttttccaaagtaaatagatgcaaagaggagacccctgtagcccttaatatttctgtctagttttatattagctaaatctttaaatataccttttgaagctttgctgtttaaattatataattggcagtaatttataaacatctgctttaatttttgaaaagccacaacagttagtgtagcatctccttgagtgttggctacatttgtatttctcattggcagagagaagtacagggaaatattcagagtggataattagtaaatagataatgaagtgagtctcccttttgtgtggaatttctgttcagtgtgagaataaggaagggcaaagccagcacccaggatctaggatccatccagaacataaaattttctcataatcccattaatgtcaacaaaacatgggtggctgatcctgaaagaagagaagttagaaattattgtactgagcttccaggatccatgaaactgaaattatataagaagatgaacattttttttttctggattgagtgaatttgcatcctttattagcccacagatggctctgagatctcacccattccttgggatgatgtatgtcaggatcctggcctcctgctgatcacagcaaacatagtgacaatgggggcaactatctgtcttccttcacctggcttatgagtcagttagagaatgagtcaggtggcttcaaggtcaaactctggagctgtggtgagaggaaggcataaatacagaaaacacatgtttagcacggacagaatgaatcacaggtcaacaaagggaggaatgtggccaaaggggaagaactctgtaccagaattcaggtacccaggatgcaggtgtgatgctactactgcctgcgacggagcactagaaaaaccctaacctctctacattcaatttttacctactaaaggagatcagcttgaaatattagcccctctagtaatctgttctaggtaaagtagatcagatcctggaacataccgtggctatcctaaagtatattttatagcttaaatcagaaccctataggaggaacaacaatatgaactaaccagtacctccagagctgtgtctctagttgcatatgtagcagaggatggcctagttggccatcattgggaggagaagcccttggtcttgtgaagattatatgccctagtacaggggtatgccagggccaggaagcaggagtgggtgggttggggagcagggtggggggagggtatagaggacttttggagaggaaaccagaaaagggaatagcatttgaaatgtaaatgaagaaaatatctaataaaaaataacattaaaaaagaaagttaaaaaaaaagcatattccagtatcatcaacatttttatgtctctgaaatggactaggccatcctctgctacattttctctgagtctgtagagtaaatgtctatccttcagcaaatatccaaatggttttttagagctatgtgatgaaattaatggtcagataaggtaataagatgaaaagcattcaggatcaaaagagctaagaagcagtgattggatgtgcctgaagccacacaattctgtaaaatgcagctcagcatggtctccaataactggatgttcaggataagttattataaccataaatttcctgtaatcatccttccttacattgggttggttttgatgtagtgttctcaggaacataaaagcaaaaatagaaccaataaaatttaaacagtctttagctaccaatgagtcattcagaaatattgagagttctatgggactgattttctctttgatcttgcttgagaggagtctgctcacttggtctggtaatttcatattctgtctactcacaagaaatatgtcacaaaagcacagaacataatgagagcccgtcaccaaccacctccttctctagactgcttcatccagtccccaggactacctgatgggccaggaatgaacacattttacaatggaggaaatgataagtatttattagagattaaataatttgtggtcaaaccaaacattgaactaggtttgaccatttcctaaacccacactttcctaattggtctatgcatcctctagggcaattgatagaaatagccaaggctaaaggcaggtccctggaaggtttcctaagggagagttagctttcctctccctctgtgatagactcattctttccatgatcatcttctcgtttgagtgtacctggttttaagtcataggatgtcattcctgaatagaacattttgttatacatatatcataaatagtatataatctttatatatttcatttcacaatttcacatttacatgttatacagtgtatgctataatatttaaataaatatgactcttattaaactttatataaataacatcatactttaaataaaatttatgaaatttagcatgtaattataagcataataagtatacatgttgtgtagagatgaatatatgttgcaaaaattacttttggtgttggtagagaaatatcatatctgttcttctggctttgcatggcatagaagtgaggtggtagcccaactaagcacagctattgggagtatatcaatattataataaaggataataaatatgtacaacaaaaattagtagctccaaattatgagcttcaatttagtgaaagtttttaccttagcattcttaaggatttagatgctatattctgatggtggaagtctggttgatacacctgtcaagtagtccagtctaaaagtggaggaagtaagtcacaaaggaattaagagacctatcaaggacacttagcaacttctgagcagaggagaattgacctctgtcaccatcaactagtacctgccaccagggtagtcaaaattaaaatcagcagtatacttggtatgaggtttcaaattaatgaaaacaaaaccatttcatttccttatttaaatcattattataaaactacatctaaattttataaattccacttttatattatcatatgttttaagacatgcaagtaacatatgactacttatcttgctctctttaaacagaatgttttccactttttaaattcctgcttctgtaattgtcgatatttagtaaaatcatatccctttaaagagggagtatgcttgttaacgtgtcctaaattcttcaaattaatggatgtgctctacctgatgatatactatactatcagtacactatacagtacacggacgatatactgaatactccgagattcaaactccttatcagacctggcatcacttgttgcaaagaaatattttcctactatgagactgcccattaggcaaaatagtcactattttggatcttttgttgaaatttttactactgttctgctaaaatatgcggtcaaaaaggtcatgaaaattacaaaaattggctttgaaaataggctaacattgctaaaaagacattttgctaatgtgtgtgtacttgtgcataaatatgtttttataataagcaacaattttatgatcaagatttaattataaaattatttaataataaaagttatcattctaaccctttactagacaaatctttacaaagatccatctaatcattatttgttttctatgtattccttcactgttttttatattattttttattttatattatttcctagctaattactatatgggcagtgatttaagaatgcaaaagtgagtttagcaaggtcctatgcttgacaaactctaaatcagaagtcaacatctccttgtaaatttggtatgatacctctcttttgctatgaaaatggctgtcctgaatcttggtgtaggctttggagtaccagacccagtttctaatcttaacaagtttggcttgggcaatatacaaagctatgctgccttggtcttctattctataaaatggacacatttatctttgtagaggtctgtagtgttgattaaactagataaacctctgtatttatttgacaactgagtacagctctaaccagcaaatttgtcttgagaggttgacagagactgggatccatactttctatgaagaagaacaatcatgcataactactgtgtcctcctgggagattaattcatattgttatgcaataacatctgaaaatgacttatctatgatttccatttttcttgatttagaaatacacacacacacacacacacacacacacacacacacacacacatatctcatcatccttttcgaccaaaaagcatttggttgaaaactctaattatacatgtacacatgtatttgcataacatatttgttgaccattttgcttccaaagagtatatttggtgtttggctttttcttccaattggagaatttaacatttaatacatttttgtgcaacagaattactgatgttgcctgatttcactcaacctttgtgctcttttctctttgtccttcctctttgtactctttgtatgttcccttagccatcctttcttgcctttaaatgttttattgcatttaacttgccacttatcgtgtgtgcatgtgttttggattgcgtgtcacagtgcccagaactttgcaggagtcttcctgctgtgtgggtctcggggactgaaccccattcttcagcctcggggcgggctcttttcgtctgctgacctacctctctcactccttttctttgcttcttaaaaaaaaaaagtaatcaccttttatgttatttcacacacaatctgttattttagctcttaccttatagaccatactatttatctgtggcttgaatttctttgaattagtatggtgcctacagaatagctcatagagttcatctcagtgaagacagtaagaagtgaacaacagtccttggctttatttcttgagagtggccacaccccaccaagcccccttttgatatagatctaagtatacagcagaatgaatggaaacctgggcttaggctgctacctagtgttgacaaatcagaggtgcctgtgcacaaaacagacaaagccagtctctgtaccgtctttacaggcacagcattctgtccttatagagatcctgctggtcttggcaaacgttgaccaagggaaggaagagttgtcatgctgcggtttgatgcctagactatttaagaagtagcttttgtgaactgtagttactcaactgagatttgaaggactagtcttaccacatcatccatgactcactataatctaatttaaaaatagcatttttatcattttatgatcagttcagtggccttagaacattatgcatgtgccttcatttaaatgtgtacccagatattccatctcctttagtgattacaaatgatgtgtttttcagtcttttccctctcttgcacattgctaatacatagaaatgttacaggttttgatgtgctgttatacatattcagattttgactgactgtattcttgggtctaagaactatcatacatattcaggttttgagtgactggattcgtgggtctaagagtgtatttgcatatccctcagaattgttctataaggagaagaatggcatctgcaaacagtgacacctggattccttcctttccaggcttttgttcccttaagtattaacggccaagactttaatagtgatgattaagagttgtaagaaaaccaccatttcttgtcctcatcttgaagggctgattaactgtttacctttacctttgctactagagactcacaggatggcttgctcatctgagtacttgccatgcaagttgcaatcctcagcacacagataaaaagccaagcacagaggtgtgcatctataatctcaatgctgggagttagccaggaagatccatagtgtttgctggccaggctagccaaattagcaagctccagattcagtaagaggctctatttcaaaatataatatgaagaaccattgaaaaagagactggatatcagcctattgctttcccaggcatgaacacacacacacacacacacacacacacacacacacacacacccttctttcaaaagtttgctaatagctctaagttctacaggtattctttatcaaactgagaaatttcccttctaatcttagttttctgggaggtttttaacctgaggttgtgcagtattctacaaaatccttttatagaaatagagacagcaagttcatcagaaaccacgttgaatccttaagcagattcataacgctggagcagctgacacaacagctgtgaaagtcccagtgaggtttactccaactaaggatgccgaagcccaagctccacaatctgaagagaagccaccgtgatgtgacacactctgtctgatgagggcactgcttttagatgcatctgtgttacaacgcccccagtcacagatgttcctgaaagacaggactatactaaagtcagggtgatctttatcttaagtgcagctgctccctaacctccagagacaggcaaagacctcaagaaggtgctgtcagtcctcaaaataacttcttaataagcagtctccctccactaaagcagctaagatgtttctcctagatatggcagatatttcttcccttatcagactaatgctgccttcagcttcactctgaagtttaatctttcaggattcagttactgactcaattaaatagatctggccgaatctctgctgaatatgggtttatacctccaggaggtctcccagctcctgccccacacctctgtgcaaacatttttttctcccaaccgaagaaatagctcctgatagttaaatacagaagaatgctatagtgatatttgttcttgggtacaaggtatgtcatcaaagtggttctggtagagtctgactggtgagaaaggtgctggtcactaagcattttctaaatgaatatatatatatatatatatatatatatatatatatatatatatatatacacacacacacacactgtaacaggaaacatgatcaatttgtgatgttgaagcagaacaatgttaggatatctttaccagaaagaaggaacttcaagttagcaattcagaaaatacaggtatacatgggactgtaccctagttattatttatattataacttggcactccaggtatgtgggcacagagatgtggccttcactctttgtagcattgctccctttttctgttaacattactgtttacatcctccaaaggcacacacttgcatttccatctgccttaggaaaattggaagcacagagaagctgcactctgtataaatactaaaacgggacactttctaccatcttcatttccagaaccctgcaaatccccatctgctcacgtgatactgtgtttctttcagttacttggctattttggccaaagttatctgactgataatattggttaacattaggtgatattagctttccattttctttattctgtattatatgaattgacttttttacaacagtaagacaaattctctctctctctctctctctctctctctctctctctgtctgtgtgtgtgtgtgtgggggggggagggggtatgtatgtgctgcaatggtgacactgtatagccagctgttctgatatcagtagcttataacaaaagcatttatgggtactcagagtcactagcctgcctccataccaggcatatctacctcatgacactacttttattagtagtggtattgctaccacggtatggtaagtgtgcataatgccatttactttgagacaagtcactgttctcttattaacttgttggcaataattaacacacaaatagtgttaaaatctacaggttaattttttaaaagcaacagttcatttcttgaggctgatatattaatggagtgatgtatgttaagttcaaactccactgcctcttgctaatccagattggatattgtagcagtggtctcatctctgacgttagctcccctagtcagcttttcctgtaatatgctactaccagattcaatttcagttcaaatgatactactactcctgtaatcaaaaatccttccaagaggctgtagacggcttaagggttaactacttttctagtgtattaaagctcattcacaacacacagagaggcggttcacaatgcatacatctccagctccaagcaatctaactcttcacccttctggccttgacaggcactcacacacatgtagcagttgctcacacatacagttaatgatgataataataataataataataataataataataataataataataaatattccaagtggatcctcactatccataggacaaaatcaaaggctttttatggtctagttttgagctctattatggtccttcatttgtctcatagttttcagatcaaaattgtgccttcctatgctcagcctggtgtgatcttgctggggacaaagtgacatgcttccttctcctaggacagagccctgcagggagtgagtctccaccagtgtccatggctgctatgggcataaggtttgtttgtatagcaatgtacatattttctggagccagtactagcagtggaggactctcctcctgaagaatgccctccctgttaatgttaatgacttcataataattagaaacatcactagttcaggagttgagggtgttgctatgtctcagcaaaatggtagatgctgggaccttcaggacagccctcaaggctgtggaaaataactctgaaaccatgagtttaaatatatatgatttttttcaactatacaaaaatataaggatgcaatatgaattatgaggagcttcatgaatctaaagggacaaaggcagctacactatgagccagcctatcagaaagatgcaaaggcagatagatttccgagttcaaggtcagcctagaacaaagcaaggttaggcccagatgtggtaggaaggtcaaaaacagaaaataagttgtgcttgtgtctagtgcaaggctgcagaccattcatttgtgtactaatttaatattatttttgttgtgattactttgagtttaattcaacctgaccctttctttagaaattggcagcttttcttcatttcatgttcgtcctatgtcatttctgagatacccgttatgctgtggagtaaatacatcctaaatccagcgggttttgtttctgttctttcctgcagtagacaaacactcatcattaagatactctgtattctgtaatttgtaatgcatgactagttgtttaatttcagtgtagatagtttttacctagtggatttcttttattctttagtctcctcctgacttggttttggaaaagataaaaaataaaatacaaagaatgtgatttaatgtaaagtaggagtcagagctgtctcctcacagcctctttctgtcaaactatttaaatgaaaaactagttgagaggtaatttttttagaagtattggataaatcttcataaattcaattttcagtgttagcagtgttcacaaaagtagaacataaaagtcaggcatgcgcacatttcccaccagctttattatgcaaaaaacatcgattttcagaaaattgagtttttcagggttggaaaagcttgaataaatcgcatgaatagctctacagaggcacatgcatgcaccccagtgtggttactcactctctcaggcatctatatgtgctgataaggaggcgactcagtgatgggaaaaaagaattagcaagaagccaagaaaagctgagaaacacacgtgcacactccctagttttcggggacctcttgataatatttgcaagtctgtgggagaaaatggaacctctcctctttaaaatccttccacagtaatgtgaaggtcgttttgttcttctgcacaatgatgtatctttcgtttgacaggaccacagcaagggtgtggtgggtacctgactgaggacagcaagagctttgtgtctcctgatcatgactcagatggactttatgacaaaggtctaaactgcatatggtacataattgcccctgaaaacaaacttgttaagctcaccttcaatgcatttactctggaggaaccatcgtcgccaggaaaatgcacctttgattacgtgcaggtaagactgctacaccttaacagtctactctaacgaatgggattttagcttactatctacaagccttgaaaatgagaacactattgcttacagtggcttcaatatatattgtagttgctagcctcctgttcaagttcatctctgatatcatcattcaaacatctcaagtgacttctaacattagcttcaagattcagttctgtcttgctaagtgccttgttatgaagcgatccatgggaagattagtcggacagagtgaggttgtcagaggactttcacaattcctaatgtaaatggtatctgaagtgcaaaaatacactgtaattggtctgtcccttttatttacgtagatagcatccaaagcttcctaaaaattccaaagaaacatttttttaagacagtgtgaagctagacggccaaactcccatcgacgtctaggaagggtgccaaggacaggatgcaccgggaggaccaaagatgaagggacgaaaatggatgactgagaaaagcttgtgacatccaggaacagtgtggtgcatggaagtcaggggaagatgcctttccaaatgatgtgtgggtagccagtggtgttaagctgtaggtcacagacaaagaaaagctgagatgaagaaagccattccattgggtgacaaccatcttaataagacatggggctagaagccagccattgtgagggagttcatgaggggctagaggtgacaaaatgtgggacaaaagtgttaattcaagttcagtccttctctaaaatgagaccaagtagccagaactacttaagaggttatttaaaaccagcttctctgggttcctgaaaagtagtaagatttgaaggcagatagtaagtagtcccacagccagaaagcacagagggatcagttctgacactcagctcatattttcctttttattcagtctagagtcccaaatcatgaattggtactgcccacatttagggtgggttctttcaaattcagttaacccaatctcggcactttctcacaggcatgcccagaagttggtcccttggtgattctagatcatgttgaggtgatatcagtatttactaccccccttttaaattgttaaatgttgtggtaaaatgacattctatagaagctaatgacacagctctataagtagtgtgtaagacagattataccagttccattgctgagttatgcctactcccttcactgctgtctttgagagtgtttactaggggaccaaggggggacatctgctgtagattaatgaactgtggctgatcaatgactgttgaaaccatcgtcacatctgtcctatggagttgtttggtagccatggtacataatatgggagatgtggcagtgaacgttccccaaggagatgtaattcattgggattggggggggggggagactggcctgtaaacagatacattatacaacatgaaaacagaagttagatacccttgacgtagaaaaggagatcagaacagagtatgtcgggcttcttagatgtgagcatgccatggcacttaacagcatcatgaaagctcacacatattgttgcctccataaaatggagaacagtatcaacaaggcatatccacaagaaagacatgaccaaaaataaggggaaaggacagtgctgtgtactacctaatctccaactcttggttagttcagtcatccttgtgttgagcaacagtaaggtggttgagggcatcaaaagtgtggtcctcctgcttcctctacctggaaacatgacactggtggaagtttcccaaggtttcttcctcaacttggtgctcttggttttggcagatatattttaaagtttccagtcccatctgaagagaaaattccctgtacttactatcctatgggattcagaaatgtgacttctaaacactaaatgcttcaaattattgttgtaaggccaattataaactcctgaacatcaaacttgcataaaaacattccctagagctttctgggagcccttgtaataactcactgggcttaacccttctgcatattatcaggcactggggaagggtgtgtgcctctttagggacaacatcagcagaccctaggtgcattggttaggagatagcactgccactaagcattcatgtacttagttattcattaaataagtgtgaatttcagtctacctcattatagatattagctcaaacatttaaaaatgcataaagagtaaataattattactgtgatactttgaatcttacatgacccaccaaagcacagccgttaagaagacatggttggtagcatgggagtcagttaggaaggtaggttactgaggacactgccgtttgaaagatacctgagtcccaaccactcttttctatctgcatcagtgcttctgtgaagtatataacccccaccccctgtgtgtccttctgtcatgaccttaacacagtcctagaacaacaaagctctataactgtgttgctatagagattagtcgtgcaaagactgagtcctagagacaaagtatatcttgagttgactattataggcattttgtcacagtgacaccaagaaacaaggcttctagaaggcaaggtgtgcctgagttagtgttcagacactaactcaccacagacatgcagtccctgctccagtgttgttcagggtctacccacagcaagagatttggtgttggcaaggaacagaacagagaaataatttcaggtttgatcatacaggaggctagtagtcatgcagtttgtaactatatattccaatcagttacgctaactcttactttaatgtggttggatgaatatagtaccagcacagggccaccttctacccagccctagcttgtccttgtcctgcccctcacatctaccagtctctaactgacgttggtcttgtaaagtaagacccaggctcctcggcatgaactgggtggtcttccccgactctctctctcttttatagtatgaatctccttgatattatttgacagaattaccttttcttttctttggtttcttttttatatttttccatgcatatttgtagatatatctgtaaacagcaacacacacacagacacacacacacacacacacacgcacatgcgcgcacatacgtttatatttagctctttcttctcactattttatgagcaccttgaaggtacataaatgctcttatgtctctccatatacacactacccaacacaagccaggtacatgatacaagtgaaagcttgtatagaccacagtggttgtaatgaaacctcacttagcagaaaaagtatgttgtctttaacttggcaactcttctctataaagtgagggtgtttgactacagaacttcacttttctgtgctcctcgtgaattcatatagaagagacagcaccatctagtggtcagttttgtttcattttttaattttgaaatttatcatgttcattttataacatcagtggccacactactctgagatttctgatctaatgtggttctgttatgaactcatattcagggctacagaaacacagaaaatcattattaaagtacaataaaaattaacaacatagacataaaaatgaaaacatactatattaatttatttatttatttatttattttttagtaaagtgtttgagggatatacaaatcctcactatttctttgggtgtttgtaaaaatctgtgaaagccatcagtagttctggatgctagagacacttctgagcataactccgtttctcttcctgtgaaactcacacttgtgcagagggggcgcccaatcaaagtaaataagcattacattgattgagtttcatcacagtaaaataaaacaagatggtattggaggagggccccactgtgtgggattagactctcaggggaggtgacatttgagtaaaaggtctatgactagggattatcagtccttcaagaaagactatgtctccaagggaggagactgtcagaggcagcaagcactgggaagggagagaagcaacagcattgaccagggcttgcaagttctgcattgggtacaaggtatagttttgtaggaagaatagacacatactctaggtcatcaaacacctgggcactacggtgcagaactctgtgagtgctctgtgcaattgatctgtgagccatgttctgaagaaactgtgtcacatggcattgatacaatatatttcgaaagtggaacaaagtggggatgcttatcatgggaatgggagagttgagtatgactggaatttagacttgagctgtttattgagatagagtagactcagggagaatattttagggaagggtgatgctgtggtgtgtacatatcactcaagtacctgtggtagaaatgtaaaccttatatccatatgctaaaggtatggggggctttgaggtataactggggttagatgaagtcatgagagtggggttcctatcatggggtgaatagtatcaccccaggagaggaagagattgccgagctggcatgctcctgatgatcttcttaggatgctcatatgttagaaggcaagaaggccctcatcaaagtctgccccttgaattctgaatgttcctcaatcctcagaaatatcacaattaacttacttgtgtataaatgacatggtctatggtactctggtacagcaacataaaacaaaccaaggcatgtgggtcatagggaagggtcaaagcacttaccaagaagcgagtaagcatggtttatgcattacacactcttaaggtctggggcgatatggcggaacagaataaaattctgtgcttctgtggaatgttgtattcattttagaaggaaaggcaatagaattggcaagttaaatgtgtaacatgttgacagtaatacttgtcctgaggaaaggagtcaggggatgtgggcagtgttcactttagggaaggcattgctggtggatgatagaggaagagagacctcaacagactccatgaataccagcaagggtggtctgggcaaaggaaggcagatgcaatagctgggaagctagactgagctggggatgttcaagaatctcaatcaagcagagcagacccctgaggtctgtgtgggaggaaaagccattccattaggtctggatcactgttgtaatggatgtagcctttgtgttaagagggtaggaagcagttaggcagctcctggtctgactttatctttttttttttttttccattttttattaggtatttaactcatttacatttccaatgctataccaaaagtcccccatatccacccacccccactcccctgcccacccactccccctttttggccctggaattcccctgtactggggcatataaagtttgcaagtccaatgggcctctctttccagtgatggccgactaggccatcttctgatacatatgcagctagagtcaagagctccggggtactggttagctcataatgttgttccacctatagggttgcagatccctttagctccttggctactttctctagctcctccattgggagccctatgatccatccattagctgactgtgagcatccacttctgtgtttgctgggccccggcatagtctcacaagagacagctacatctgcgtcctttcaataaaatcttgctagtgtatgcaatggtgtcagcgtttggatgctgattatggggtggatccctggctatggcagtctctacatggtccatcctttcatctcagctccaaactccgtctctgtaactccttccatgggtgttttgttcccaaatctaaggaggggcatagtgtccacacttcagtcttcattctccttgagtttcatgtgtttagcaaattatatcttatatcttgggtatcctaggtttggggctaatatccacttatcagtgaatacatattgtgtgagtttctttgtgaatgtgttacctcactcaggatgatgccctccaggtccatccatttggctaggaatttcataaattcattctttttaatagctgagtagtactccattgtgtagatgtaccacattttctgtatccattcctctgttgctgactttatcttaatagcaacctgttagaggtgggaaggttggttctagccaggaagctttaaaaaaaaaaaaaccaaaacaacaacaacaacaaaaaaaaaccgtggtgataattcaggcagcagagagaatagcaatgggtttaatgactttgaggccagggggcttttgttgttgttgttgtttatttcaattatatattacttttcctaacagaaaaatatatgatgggcatcactgaaagtcattatagcattatcaatataaattaagactgcctataagaacacccacatatagatccgtaatccatggtctgtctatcaccatagatatatggtgaactcataggtaagttagtgcaaaatagcaattcccttattaataattaactactataaactactttttcttccagatagcagatggtgcaagcataaactcatatttaggcggaagattttgtggttccagtaggcctgccccttttatttcttctggcaactttcttacagttcaatttgtctctgacataagtattcaaatgagaggatttaatgcaacatatacctttgtggacagtaagtattctgacagattatgaaatacatatgtccttatgcacagacaagaatgcatgcatattacatgtaaattaattacagttttagcggattattaaacacaagagctagattgcctgccctcagtttccctttctttgacaacgtctcactaagttgccaggctggccttgaattttatccttcagcctcaagcttgcatgaaggtaggattgcagccctgtgtcaccacgacatttactaaatccttaaaagaatattaacatgtttcctaggccagagaaagatgttaaagacagtatgtataattagagatgattaaaacatctacattattttctttctccctcttcagtgccttgtgggggaacatataatgcaacttcgatgcctcaaaacacatcatcacctcagttgtcaaacatcagacggccattttccacctgtacttgggtcattgaagctcccccacaccagcaggtccagataactgtgtggaaactgcagctgccctcacaagactgctcaaggagctccttagaacttcaggattcagaacaggtaaagatgccaggatggtggccgtcgtatttgcagacactgcaagtaatgaagccatgcctaaataaagtcctgttacttctagaattgttttttcagtaggagacaaaacctcccttgctgacatactaacccatttaaatgtagtcctgtcgcaagatgctttcaaacagtcctatagctaagaatcatctgggggtcttgttaaaaatgcacattcctgaaaatgtcaaactttgtggagctctttcatttactattgtgcatttaatgggtatgtaatgtgtcacaatggacacatgccatatgagcatagagatattgataggagaacaaccatctgtctcccagcatgaatagaatatatgtagtagccccaactttatgtagactgtctgaatgtgataaaactttgaaattaattggtttaacaactttatttgggacttccacaaactcacactgcaaagaaaaaaaaatcctatgactattattattgtgaaaattcttctctttgtcctggttcactttataaatgtggcctgactgacatgataggaagatttacgaatataatcatattctgatcgctttatagaaaggatgctagaagtgtgagccatgtaataaatcacttaccatcagaggtatcttcaaagatgcaaaataacccataatgaaggggaacaccatgcctataaacagtaggataaaaacttaaggatctgatttctctttaccattagtccagattgcaaaattaattcataaaaataaaaagatttctcagtgtaatgaatgtggttaaaaaaaaaaagaagtaaaaagacataagaatcaccccctaaaaaatgcacattcctaggcccccctgcagacaccgattgatctgcctaacatgcattaatcaatgtttgatgagcatctcttgtattctgccataatcccagagctctatgggccacacctggagaactacatctgtagctaacaggctatgtacaggtgaaatggagggacccatacagaacacaggaaaaacagctaagagaccatttcatgcctatctagtagggctacaattgcggcaaactgagagaataaaaaggggaaacagaagctttctgggctcaaagagataaatagtggaatcttagtttcccatggggaaagatggcacaacagctggtgtgagaaggacccagagatctgagcatgatcatctcctcaattggtgggcagaatggggagagcagtaaggcgaccaaagaaaatatttcaattcaggacccatagtctgagctcataccctgaaactattggagtctgcagttgggtaaacagttaacacacttactctcagaggccatatttgaatgcccaaggcctggcttaaatggagctccacctgtcaccttctgggttttcaaggccctccttgttataaagctgggctttctcactttttccaaatctctagctcagtgacaaaagtccagcttgactcgatgtggagggtcagagatgcacatgctggagaagagctgagtgccgcatagatcctagagaccaaggttactctaaggatcccgaggtggttgagaaacgaggttaagcgtcattcccctagcagtggttgcagcacagaattcctgtaccccaatggaagccccagtggaagaacttagagtgaagtgcaatgagaccctttcactcaaagcactttgagtttcctatcactttatgaataacgcaaatcagggcagattcctcattagggcacaaaaataacatgtacaggcagctgtggtacacaagagcagctggattggctgcaaatactacaattgaggatgtttagtgtgctgtctataaaaatactcaaggcctctaaagcttcagaacacatctgggacatagaaaattattatgagctaagacaccacagaagatagacgccataatgaacaacacagaagagcccaccccactgtcttgcactatgtttgcagagtaagctgtggagcaaaccttcatgagctgctggatacatgagagtcacataaggctacaaagttgaaaatcttgggatataaacactagggggaggctttagcaattcagttaaagtttaaaggctacatcagacaaacttaggacaaacttaggacaaaaacaatatggaaggctaagtaggtcaatgagacagagtaataactaaggagtctagaaacaaggctggagcatgtgccttcagacagagaccaagaactacatgtacttcagtcataagggtaatgtgacaggggctgttgttcaatgcctttgggatacttgcttgtacgtgtagaaattattaggcatttaccctgaacatttgacaggggatgaggactgccaaagtgctgctgaagagaataaggccattattacaggtaccaagtgccagggacaactgaaggggaagctcaccagacagagtacttccacctctgcctaacctaatagaactctagaacagggtaactagaggaagaactctagacctgtagggagttcacatgccctggctctgttcccacacacactttcactctgatatggctcaagagggagcagctttgatttctgtggagacgcgtctgctcataattttagcggaagctgggttccttatgtcccacacctctagggaggcaggacactgctcaattcccaggttaatgctaagtgtttcatggcatctgagactagagctgttgaagtcacatgctcagtacagtttactatctggtgtagctttactgtcctgaagccaaatctcatgcaacatggcttccatttcatttcagactaatggaaaccaagtgactcagttctgcggtgcaaactatacaaccttgcccgtgttctattcctcaggaagtaccgcagttgttgttttcaaatctgactttttaaacagaaactctcgagtgcatttcacctatgagattgcaggtgagcctaaaacctcatgtttatcggggaaaagcagctttgatgaccatcattgttggagataagtcttgtgaacagataagttgttgttaagataaactatctccatgtgaagtaaggttgaatttaactttttggaagctaagctttatcaaggtataacgtatataaagttcacagttcagtgacttttggtgtggtcacagtggtgggaatcactttaccttaggaaattattttgtaaatgaccacggtgccttgaaagaaattacttgatttcagtgaatggaagtgtgtccagaccatgtttcttcatgtaaggatggttttttaccttgatcaaaactacagcagaatttgatttgaacatagttacttttggttttggtttacaaaaaaaagaaaaaaaatgtaaaaagaaatatgtgaattgaatcagaaggaacagtttagcaatggaaaccctacacagctgatgtctgggagggtgagctttgggtctggaaaaggtccaactgtcaaccagcaactcttcttccatgtaagcagaagagttcagaagatgctggggtgctcttcaaaggggacttgtactcccactctttacgagggggcatgaacaagtcatgtcacggaagctgctgtggggggctgcccacatgaggaagccgctgagcctgcacgtgggggctgcgcatgcgcaagccgctacacagcaactgaacatgcgcagtgctcagcatctctcaggtccctgttctcttatacaaggcaagaggctggagccctttctgaatgttgctcagattcagtggactgtaaaaccactgttgttatcaagactactaaatatttggacctgcacattaactatgaatcctgtttttctctaagactgcaacagagaatacaaccaagcatttggcaatctaaagagtcctgggtggcctcagggctatgccaataacctggactgctccatcattctcagagccccgcagaaccacagaatttccctctttttttactggtttcagctggaagattcaagacaatgcatgaatgacttcttggaggtaatacatatttgcatataatttaaatggattacataagaacatggatggatcactaagaatttttttctcaagatattaattcaacatctctattttattaagctagtcagtattctttcatcctataaatgcgtactgagcagattccagctacagcactggaagcatggttgggtggcagtgtcaccgtctgtcatggcaccactcagcaatgggacagagatttttcaaaggaacatggatctgagttccaacctgcaggctgaatggaatgtcatgggcaagggccggttacctgcaaaggtgtttacacactgttccccgggcagtgagcaagcacagcatcttggctctgctaactgagtcgacagattccccgaggctctctccattggccttatggctctacaggaaagactctggaagatgtccacagcttccactcctgactcagagtttcctttcttctcaaactgcctctttgatcacatccttaaatgcttaatcactattttaactgagcatacgttggggtgcagtatgatattccaaacacatatataatatgtattaatcagttcagagtagttaatatttccatatttagttagctttattatatttattccaaatatgttctccagaaattttgtgggataaataacttccggattcacgctacccctttcctggtaacctttcttttctgtcagccttttttcctgctactttgtaatgctaacagatttcctgtctttctggtcaccagctcatctccagtggccttgtttctggcccgctgtcccctgtgtagaggactacctggaggagaatggagttccagtagatggtctctgcccatgtgttcagcttccacaggcttcctcttaccttactatgtaggaaagctcccatctcagattgaactgaatctgctgtcaaatggaatccttatcgagttgtgaattcccggggaaagctcgtgattcctcttggggtactttccatggcaggagatgagaaaagggaagaaatgaagacacagaagctgtgctgtttgtgctcgtcagggagttaagctcggatttacacgcttacacatccacaaaaccagatgtttgtataaaacagatgtgtgcacaaacaaaaagagagggatgtagaaaagggctagagtcccttgctaaccccgagtcatagtcttaatccatccctaactcaaggtactagttactggccccacttaatcttggccgtttgtcatctggatgctggaaagtgaagacttactttttaacattggatggtgacagccacaccagccagacatcctccctctttccacagaatgatgggaagttctgttacattagcagagagaggaagctactacacaggcctcagaaacacatctgcctctggagctccaggagagactctgaagggagccctggtgttctattactttagctatggtgggaatagaagtcttccatgaggattctagtgcatttctagcagggagggcatggctaggccctacctgtgaatatgcctccaactcccctctccaatgtacatgcttctgcataattcatgagctatgcctcatccttctcagaaaagtgaatgtggtaagctctaagcagtggatctctcctcccccgatctcgcagaagtgatttaagagaggatccccaaggaaagaaactcaatgttgagagtatggggggcgggagcgggtcaagccttgtagcgttcttaaatgtgtcagctatcccacgtactgggagggaactgaccagtctgtcctagccagagatgttttgtttaaacatttaagagaagaaccaagagtgcatcacttgccattgcctaggtatagaaagagcctcgccagctcagatgcccaagtaaatgtgcacttctgcagactgcagtgactctaaaggctagccagattctggactatggaacgatgaagggaagtggggtagcttctcacattgaacatgtacacgctaacagcagctcttcatgcaggtctacagggtgaggaatattataggcacatggagccatttacttttcccacaaggaaaagatttgtttttgatcttcggtgttctttgttcattgtggccactttaagctttccagtgggaagcatccttcccccggcccccactgtgatcccaggaataaagtacaactggaaacaggccaaacagtggtgccccttcccccttgaaagtccactgtgcattcctcaaaatgtgtgcacacataacactctgtaggatcatggcaccggctagtatatcacaagaatgtcagtatttctgaggctatactttatcagatatttctaaatcccaatgcaaatggcgagtgctgtaaattcttatatgtcttcatctacaaatacttgaatatgtaaagccccatttcctattctggagtctgagtggcctgacaagaataatgggagtctcaggctagcttgggctagcccaagctagcccaagctagcccgagctaagaaggtgatactgtctcagaaaacaaaaccaaaacaaacctactggatttacctcacgtgttagtgatgagctgaaacagaggtgatcggatgggtaaccaatggtgggttttcacaggtaagaaatggcagcagcagcagttcaccactgcttggcaagtactgcagcaacctgctgcccaaccccatcttctctcagagcaatgaactgtatctgcacttccacagcgatgactcagacacccaccatggatatgaaattatctgggcctcctctcctactggtaagatgctcactctgagggaagctcctgtgggctgatggggtgtccaccacaggaaataacattacaggaaataggaatgcggccttcagcacattaggtctgcgcctgatgattttctgttaaagacgcagatttcttaacaatgagagtactgaattttcaaaatcctacaattatttatcatttctttgatgtaaaagactgaaattttcatataaaaggtctgacaatgtaaacattccatgtaaacattatttttgttcttcggatggaatacccaggagttctctttgagaattcaggaaatgaaatcacaggacaagtcagggccaaatctgtgtgtgtgcaggcagctggctctatccacaatgagcagcgggctgcacatgtgaccgtgtgtatgcacgtctcatggtatgtgtctatgagaagctcaatccttcatggttcctatcatttggtggcagtcctgtgtcgtaattgctacttcagggtgataaatgtcttcttgaatttttggtccactgttcattaaatagcagggaatttaagtcacatgaacacatttagatcgagaaaagagggatacctccaatacttcaattttataatatctgggaacctacaaaataaaaatcatgaaaggaatcttttaagtatattaagggataagagagggtcccattcaataatcacagaaaacaaaatctacacacggaaggaagcccagtcattaacttccctgattggtgaaaaggaggaaccgatgaatgcattggccatggccgcaggcctgcacatgagggagtgaagccgtaagccactctgacctacatagtaagaactgatcttgaagagagagggagagagagagagggagagagaaggagagaaaactccatgctccaggaaacatggctaactctatctttacacgggaagttggttacttgaggagagactttgatcttgggacccataggcaccctgttgctattacacaccagagcccccacagaaaggtgaccctgctcaaggcattgtaccagatttagaagttgagaaggtcttagaactgctagagtgggcctgatgagttttgttgtagcatctaagctgtgacgtcagacgtcagtcgtcagtctgggtgtgccacagaatgtgagttgattttcgcagtcattaatattttctatgctcagggagtctgctgtaccctcaaagcatgcagatggagacttttctcttggggtaactattgtattgttttccagtttgttcctagcttgaggttagcaaagaatagtcccgggggaattaccttgggtcacagccactgggaaaggactatccagtggggatgggcccggaggggctctcaaccaagaggagggtttccatgttgggcgctttctacctgtgtgggaaagcaagctggatgctaaatggaacctttgtccattctttctttgcaggctgtggagggactcttttgggcaacgaaggtatattagccaaccctggctttcctgacagctacccaaacaacactcattgtgaatggaccatcgttgctccttctggaaggcctctctctgttgggtttccctttctcagtatcgactctccaggtggctgtgaccagaactacctcatactcttcaatggtccagatgccaactcaccaccctttggaccgttctgtggcatcgtgagtaaacaaacaagctattttacatttccacatgtaaaatttcacatgtgattttttaaacagtgacggtaacggtaactacaggcacatgcaaaccaaaaaaagaaaaaaaaaagttgtaattcagtggctttctattttgggagtatgagcaccatctagtggcagatatgtcatattacagttaccactaaaagctacagaatcaaaccttaccagggagttagggcactgtttttaatttttctcctctttattcgcacggccctttgaaccaaacaaggcaagaattatatcactggatgtctagagaattaaaaaaatataaaacttattttaaagcttgtaagattttatttttagaaacattagaaagtacatcgtaagtttaaaagtttgagaattctatgtattcaccacttacctttctttgaatacatatacacatttgcatatttgagcacacgtattttcatatctgaatgcatacacatatctgcatcttttaaactgtttataacttaccgatcctccactaacaccttcccacattaatgaagaaacttttttgatgtattatttcccatgtacctgagtgcagcctggattactaaacaaagcctctgggtttcgaaagtaacttctccccaactatatccaccattacagctctggggaacatatcttaatatgggaaaatcagttacatggggaaagaatttgatcttgggaccagtaggcaccctgtttgctattatatgcaggataaaatgagagataactttgttatctttgtatggctcctgtgtgtagatttgagtaccttccaagcagtcagatctatttgaagccacagttggcagcctgtgctgcaggaagagttcactctggactttgtagatgaaggacagaggcgctggaaggtggatgactccctcttgtagctcagtgtcatctcaaatccaaggagataatggatacgctgtatccattatcaaagtatactcctttccatatgtaatgagttttccatttattttattaacatttcacaatgttaacctatcatataaagcataagaataaaagaaataagaactaaacgctaaggtaaagcgccagcagcctggcggttgtgtgtgggtctgcatgtgctaacaccagcagcctggctggggtggtgtgcatgcgctgacaccagcagcctggctggggtggtgtgctttatggcacagcactgatgcgtgccattgttcacattagttcagatacacagaagataaaagaccagtgaggcccaccattacctccccaaccatcgccttgcagccttctgtctctggaggcattctgttgtattaattaatgcactaattattggtgtgtcacagttagaaatatatgttgcttcactcttagaacttctatagagtttctataggtaacactttaagtatgctgatatttctagaaatatgtttgatttaaaaaataacctttcttcccctcctcctcaattgcaggacactgtggtagcaccctttcatgcttcatcaaatcgggtcttcataagattccatgcggagtatgcaaccgtttcttcaggatttgaaataatgtggagtagctgaatcgggagagctgtgtgtaacccctctggctctgccccgcgccgtcagacgcaacccgcaaccctgcccagaactctgtggttctcatccccatctctgcccacgccatcaaacacggactgagcttctatggcctttacaagagaaagtgtatgaccaatttttttacatttggtgttctgaaggcagagcctggtggtgttccactcaggtgtacatgccatccttactggatgcaccatttagtggagaccttttaaaacgttctttaaagggtagaaattatcctggcacactgatgtacatttctaaaagttggtgatacaaatagctgtatggtttccactatacaaaagtcaaagtacgggtaataaacatttcttaaaacca

SEQ ID NO: 69 - DNA, 235505 bp, Homo sapiens; identical to SEQ ID NO: 23
  source 1..235505: mol_type = genomic DNA

SEQ ID NO: 70 - DNA, 81365 bp, Homo sapiens
  source 1..81365: mol_type = genomic DNA
ctcctccccgaggtgccggtggccccgccgccactccctccggctccctccctcccgccgcggcgcgcatctcattccagccctcattccgcgcattccagcgtcctcctcgcacactcgaggccagggggcgggagggccgcagctccggcgccgccgcgtcccgccaggtgagaggcgcccgcgcccgccgcacccgccggcgccctcacgggccgcgcgccccacgccgccgcagccgaccgctcgcgccgcgtgctcggctgctcttttctttccgccgcccgcgttcccgccttggacctctgcgctccgacgcgctccgtcccgacctctggcttccctccgcgctccggcgctgctcgctgcccctctcccgcttccctcctgtccgccccgcgctcccctcctcgctcccggttgactcactcctccaggaatagggatccccgtgttttcccgtcagtcccattctgggaaaactcctccctccgcgcgctccgctccgctccgctgggcgcaccggggccggtcggcgcggggtgggcttggccccgcggccccgccttcactgcgccgcccgtcggccccggccggagcccggctctgcgcgctgacgccctgtcgtccccgcagaacgatcgccgcggccggaagagttggcgctcggggcggactccttggaactggcttagcgcacccatcccaccttcccgcaccctgggaccggtaaggctggggcgcggggacttggtaggactttgccggagggcaggagtctgcgcggtgcgtgcggagctccctcccgggacgagactgggaagagcgaggcacgtggaggcggcgcgactgaggctgctggaggcgaagcggctccaggggcgggtaaggggggtggacactcgggactttgggggaaagggaggccggtgtggaaaggaccggagaggcagaaccgagagcatcggcaacagaagagacccagcacccatgcctcttttctgctgggcccttttcgagcctggaagggagagacctggaggtaagcggactgcctgttttaagtgcaaaggcgatgcgaaagtcgggggacccctgcaaaaggtcctacacctcagggcttgggaagctgctgtgtttcctgatggggactagtggatcgatccagggagcagaactttcaaaccccaaagtgaacatttcccccgttgtgctgaggcacttgaggccccgcggactgactgcgtctgtgctgagtctgtgtgacacctgactgcgagtccccctcgctttgagtctctgtgtgggtgatgtctgttcacgtgtggctcaccttggcttccagtgggcgtatttgtttgtgttgaacgtgagtgacagagtgtgtgtatatgtctgcgtgagaaggggctgtctgaaagtgagtatctctgagtaggtgtgtgatgccacgtctcttgagtatgtgtttctcttcgaggatgttggttctggctaggactgttcttcctccctacatagccgtgggcaagagtcagtgtctctggttgcctgagtgcagggataatttgactgtggttttggagtgtgtggcctccaggctccgtttcccctggaccgggcagagctggaaggaagctggctccacctgcctcttggagccaggaggctgactttctcagggcgagggtcttgtgcttgcctggaataggtcaaaaagctggtaggaggctgaaggaagttgagatctttgcctttgggggatgggatgggcgggtgagatttgggaaggtttgtcggggtggatccccgggaaaaggagacagttttgaatctggagacttgtgtaaatagtgcttttaagttgccctcaaggacaaacagggaggtataccagcctgaactacttttcctggtttaactctcctcggagctgaccaggtaacccagtagaagaatccctcattctttccaacttgccagacactcagcacttcctttgagaagaggaatgagtagcttgttgcatgagggcttcaacgtggatatcatgtgtagggcttcttggaaggaaggagccagaaactgtctcgggggttgggggttctcgtccttgctcctccatccatcctgaggatgtggatgttcttgtgggaaacacctcaccctctcacctcttcggcctggtgtgcgactggtctaaaagcagcactgatggagtggaaagggcacaggtttggggtcaggcagaccagggtacaaatcctgagtctctcactacctttaaggctctcaggctgtttcctggtgggtaatacgagcggagcttttctgtccagaaagtttcttgtgaaaagtcgatgtctgcagagcccccacccagcagcacagtgcctggcacatcccatggactccataggatagctgttgtatccagtgtttccttcgcttatttcagtaagaacccctttttcctagggattagtgttttttgaattagtgtttctctgagcaccatttgagaaaccttgccctgtctatcatgtttatttagcaaacatgaatcgagcatttactgtgagccaggccctacgctgtgttccgcgtccttaggaatccagggtcctagtggcccaggtcaggagggagggggacagacagggctttgtcaccagagaacagagtgccagcttctattttctgattccagttttgccttggccccagggtgagcttgctgaacattattagataccctaatgtcagcatctaagtcccccattttattttattttactttatttttattttattttattttatttatttttgagacggagtctcgctctgtcgcctaggcagtagtacagtggcatgatcttggctcactgcaacctccgcctcctgggttcaagcgattctcctgcctcagcctcccggccggctagtttcatatatatatatttatatatatttatttatatatataaatataaatatataaatatatatataaatataaatatatatatatattttttgagatggagtttcgctcttgttgcctaggctggagtgcgatggtgcgatctcggctcaccacaacctctgcctcccgggttcaagcgattctcctgcctcagcctcccaagtagctagaattataggcgtgcgccaccgtgccccactaattttgtatttttagtggagacggagtttctccatgttggtcaggctggtctccaactcccaacctcaggtgatctgcccaccttggcctcctaaagtgctgagattataggcatgagccaccactcccagccgttttttgtatttttagtagaggcgggatttcgccatgtttgccatgctggtcttgaactcctgacctcaggtgatccgcctcggcctcccaaagtgctgggattacaggcgtgagccactgcgcctggcctaagtctcccattttaaagatggggaaactgatgctcctagagggacagtaacttgcttaatgccgcaaccctggtgagtggcagagcagggattagaacctatgctctccccttggcgttctgtctcctgccctgtggattgcagtgcttgtacaccccctactccccctagccgccttcatccaacaggcgcggaagctggagcagactgacttgggccatgccttgtcgctcagataaggttggtaggaggcagaaatactctgctccgacctggcagaaagcacatagctgttctggggaaggagccatctcactgtagaatctgtggagtcgggaaggggccctcgggtctttaaaacacaccctcctctccccttgatgagccggcaggtgaaggttctccctatctttttagatctcctgggttgcaaatgtcacaacctcctttgatttccactctggagtcttgccccggtgactgtcacaaagcaatgcctgttgccaaacctgtggctcctccttctccttcccagtggaagtggaggacgttggtccccagctttggaccttgcctttcctgcagttgaggtcagtccagtggcagttggaaattcagggcttgtgagggtggctttaccttgcctgtcttcctttgcccccatgaccctttgttggccggggttggacgacagctccctttaaagctctgaaattggagctgaacagctgctgtccagtaaaggggggtgagggggctgtcagcagccaggagggcccaggtggaggtgggggcagggctttgtcactggggagaacacggtctccagctcctatcttctaattccacttttgcctggacgctttctgagatgacggttcttcccttgcttttggtttttcccgctactatctgggagattctaatcacacctgtgtgatctggccctggggcccttagctggtggggactggatatttgggaaaatttccactagaactcaggtctccaagatctatgcccacgtcctcctgcatttaatacaggggggctcctggaagggccagaggatgggccaggctccctgtagcgggggctggctccttggcttggtgtgggcaggcgggcccccatgggtggggactctgcttcctttgacccaaacttcatgggaacaatagacttcagaggagtcaccaggggcaggaaatgggaactgtgcagagccaggggtgaccctcctgggggatgggattgcatatccggtagagggttgggggcagtgcagagggcgctggggaggggctgatgacacatagggtgggcctctggggtggggccctcctccaaagggggccgttgactcagtgtgaagctagagctccgtgccggttctgtgctgagctttcggctcttactagcacagggctcgtgtttgccagcctccgctcgtgccacgctcgcccctgccaggacttggtcttccccttcccctcaagcccctgagatgtctttgcgaatcatcctggctgggataaaaggctggtgttgttgctccctggctggtctccaccttggctgtgagccttgggcagttgtggctggaacggcgatcttgggttgtgggcaaagctctggacagggagtccccaggctggggtcgctggacaacgtgagggatttctttctttctttttttttttttttgagacggagttttgcttttgttgcccaggctggagtgcagtgctgcaatcttggcacaccacaacgtctgcctcctggattcaagcgattctcctgcctcagcctcctgagtagctgggattacaggtgcctgccaccacacctggctaatttttttttttttttttttgtatttttaacagagacagggtatttccatgttggccaggctggtctcgaactcccaacctcaggtgatccacccgcctcggcctcccagagtgctgggattacaggcgtgaaccaccgtgcgcctggccatgggggatttctttagccgcaggcagagcgagacagtgggtggaacgttctggaggcggaggactcttgtcttgcctccatctttgtaagggtcgaccagactttgtgaggaggccacagcttaccctgagagaattgtgagtcaggccacacaagctgctttgcctgagttcaggttgccggattctcacagataggctttggggtcccaagagaaggtgtaggagtgaccccagaaccactgccaggacctggaaggagggtaggagtaggagagacaacacatgctgtcttgatttgtttcttcaaggaagcaagatggggaccctggaaatggcagactcctagaattgattccttgcccaattcttggttagattttgttttttaatgattttttattttttgagacagagactcactttgtcacccgggctggagttcagtggtgcaatcatggctcactccttgaactcctgggctcaagcaatcctcattgccttaacctgagtagctgggactacaggtatacgccaccacacctggctaatttgtaaagtttttttgtggaggtagggtctcgctttgttgtccaggcagaactcaaactcctgggctcaagcaatcctcctaccttggcctcccaaagtgctagaactgcagatgtgagccatcataccctgccaatttaaaattttctagtagccaccttaaaaaaaaaaagtgaagttaatgttggtgttttcttaaaccctagtgttatcaaaaataatttcagtgtaataatttttttttgagacggagtctcgctctttcgcccaggctggagggcagtggggtgatcttggctcactgcaagctccgcctcccgggttcactccattctcctgcctcagcctccccagtagctgggactacaggcacccgccacctaatttttttgtattttttagtagagacggggtttcaccatgttagccaggatggtcttgatctctctaccttgtgatccacccatctcggcctcccaaagtgctgggattacaggcgtgagccaccgcgcccggccataaatttttttaaattatcattattattattatcgtagacagtgtcttgctctgtcacccaggatggagtgcagtgatgcggtcatggcttatgcagccttgacctcccaggatcaagcaatcctcccacctcagcctcctcagtagctgggactgcaggtgtacacggttgcactcagcctaggttagatttttgaacaaaaatatgtggagagtgtgaaaatgaagtgagatacctagtagccaacctgggttcactctaccaagtcttggagaaaacaactctaacttgggtggaggaatgttcagtaagccttttcagtctaatgatcttcttggtacaagagaaagcagtgtggtctggctgatacagcagggagatggatgtgtgactgcttgacccactacgctggatgctgactcctaactcctgagcttgtgttactgtgaagaggtccccgtgatgtgccgcagggctgtctttggcttagtcctctatgttttccatagatacgagcctctcccaggagcctgtgtggcctgtgtcttctgtttctcatttctttttctttctttttttttttttgagatgggtcttgctctgtcaccaggctggagtgcagtggcgtgatcttggctcactgcaacctctgcctcctgggttcaagcaattctcatgcctcagcctcccaagtagctgggattacaagcacacgccaccatgcccagctaatttttttgtatttttagtagaaacagggtttcaccatattggtcagactggtttcgaactcctgaccttgtgatctgcccgccttgacctcccagagtgttggtattacaggtgtgagccaccatgcccggcgtatttcttttttttgagatggagtctcgccctattgcctaggccggagtacagtggtgcgatctcggctcactgcaacctccgcctcctgggttcaagcgattctcctgcctcagcttcctgagtagctgggattacaggcacctgccaccacgcctggctaatttttgtatttttagtagaaatgtggtttcaccatgctggccaggctggtcttgaactcccgacctcaggcgatccacctgccttggcctcccaaagtgctgggattacaggagtgaaccaccgcacctgaccctgtttctcgtttttatgggcgttgagggtagcaaacattggctgatagaaccagggttcaaaatcatctcagttgactggaatgctgccattaagtagaaagatgaagtttaaaaatatttctctcttaaaattaatatatgtacattgtaggaaccctggaaaataaagaaaggcataaaggaaaaaaatgatacataatactataattcgggtgggctggtatttcggtgaatgtccttccaaatttgtgttcatgcaaatctatatattttaacataattgcaattatactctatcccgtttttttccctactgaatgctatctaatgggtaatagtgcatgtcataaaaaatacttaaaaccataattttaaggatccaagtaacattgcattctatgactatactatatttaactatgccctactgactttaaaacattgtttttagtttttagcttttaaaaattacttgacattgagcaatgttgaacatatacttatctcaagaagaaatgtaataggtctaagtgtaacatcctgcatttaagttcaaagcatcaattatgtaagtctagaatagagtgggacttactcttcattcatgttgagggaaaaggcttggggttttgggctgaaaaacgaaggaagagggaaatgaacattttaatgcctgttaggtgctagaccattattctagacatttctgccttcatcatctcatttcatcctctcagccctgtgagaaaggtttggtttgtttttgttttgtttttcaacctctactttacagaggggacactgtagaagttatactgcagttggagtttggacccaggtcaatctgactctcaaactgccccattaaaccataagcctgtgtgggccagtgctgtggtaaggtctgtgtcaagggaaacctttactcactaagctctgtgaccctctggccacattggaagccacatctggttttggaaagtttatatatcctgagctgttaagtattgagctcgccatttttgtgggtcttcctctacccccaaccagtgatctgatctcaaacatgtgggtcttttttttttttttttttttgagacggagtttcgctcttgttgctcaggttggagtgcaatggcgtgatctcgactcaccgcagcctccaccttccgggttcaagcgattctcctgccacagcctcctgagtagctggaattacgggcatttgccaccatgcctggctaattttgtatttttagtaaagatagggtttttccatgttggccaggctggtctcgaactcccgacctcaggtgatctgcccacctcggcctcccaaagtgctgggattacaggtgtgagccaccgcgcccggcctttttttttttttttttttttttttttgtgagacagggtcttaactctgtcacccaggctagagtgcagcgttgcaatcacagctcactgtggcctcaacctcccgcgcccaagtgatcctcccacctcagctttctcagctactcaggtctcagtagctgggaccacaggtgatgccatgcccgcctaacattttttttgttttaatttttatttttcatagagacaggatcttgctgtgtttcccaggctggtgttttttttgttttgttttgttttaatagataggatcttgctctgttgcccaggctggagtgcagtggtgtgatcatagctcactgtagcctcaaactcctgcactcagatggtcctcctgcctcagtctcccaagtagctgggatgacaggtttgtgccaccatgccctgccaatttttaaaactttttgtagaaacaaggtcttgctatctttattttgcccaggctggtcttaaactcctcgcctcaagcgatcctccagcttcagcctcccaaagtgctgggattacaggtatgagccactgtgctgggcctgtgagtgtcttaacagaggctggatgaggacttagaacctgcccagcatctgggtgctgtcatttctcatttctagaaggtaggcaccctttacagcagtagcaggttaggtccatctgacctgaagtctattacttcattatgtaaaaccacataaaactagtgggccctctgtatctgtaggttccacatggattcgacccaccctggatcgacagtgttcaggggaaaacattccacagagttccagaaagcaaaacttgaatttgctgctcactgaatgctgcattgaatccatgcaaatgaagtgatgtgcatgcgttgtgttaggtatgataagttctctagaaatgatttaaagcacatgggaggatgtgcgtaagttatgtgcaaacactgtaccgttttatatgagggacttgagcatcctcgggtttcagtatccttagaggccttggaaccgatcacccacagataccaaaggactactgtacatagagtttcattatgtagaacttactagggatgctttggaggagtctctgccctgcatgggaaaggactaggtcacctccagggccactgcttcctcgaagattttgtggtcctgggcctcagtttctccacatatcagcatgcggggattccactagatgaaacacttcgggattcctgctacagggaggtagtacagcgaagctgcacctggagttggaggcaaggcttgggacgagggtgcagtgtctgagcagtcagaggaagcagaatggggagatgagggaattattgcgtggctgccatcgtctttgtccaaacaagcacggtgttaggaacaggcggaatctgggtcttgccctgaggctggagggtggggaagatgaccccccacaaccccagagagcagtggctatcagtgcagactccagagtggtgctgtccaatagaaatactatgtaagcctaggagttacatttaaaaagtaaaaagagctgggtgtggtggcttttgcccatggtcccagttactcaggaggctgaggcgggagagttgcttgagcccaggggtttgagaccagcctgggcaacatagcgagaaccctgcctctaaaaaaaagaaaggaaaacttaactggtaaaatgcattgtaataatatattctttaacctatgactacaatattatcattttaacgtaatcaatagtaaaaagtatcaatgagatagtttaccttctttccacacaaagcgctagaaccgtagtgtgtattgtacacttaacaacacgtctcaatttggactaacaacgtttcttgtgttcagtaaccacgtggggcgagtggtcgtggttggcacagtgtggctttccagccagcccgcctgggtttgaatctctgttctgccacttaacacctgggtgggataataaggttaatagaaccaacctcatacggtgtatgtgaagactaaatgagttaatatctgtaaagtgcttagttctttccccggcacataataaccactgtgtaagtgtttgtcaaataaatgacctataaatggttcttaaaaactgtcgaagctggaatttgtaagaggtagggggtcgatgatgtgtgtggaaaaacccaatcgtagagtggccctgtggagttactgatagtccacgtttgtactgtggtagttctccataatgaaatggacttcagatccgaagatcctaatctactctttgctgtgaagagcacctgccttctggaagtgagaaatgacagcatcctgatgacaagacaggttcccatccctcggcaggtgcatcctgagcatctgtctgcctggggcttgaactgtgccgggtggcatgcaggaagcaaaagcatcctcggaaatgctccgtcgtaaattgcatgacctcatgttggaatgagaggtggggtcacttccagcacttggaggttgaagcaatagttgctgcttatgcaagagaagaagtaagctgtaccagtgcctcccatacctcctcagggcactgccagcccagcacagccagctctcctctcttggcatcagctccctccgactgcacctgccctcacccaatccacagcagccacagcacccacggtgtgcccggcactgtgctaggtgcagcgggagtatggaacggaagccctggttcctgtcctcatggaacttgcagggaaatggactgtgaagctagcagtaacatactgcaagacgaaagaacgtgcacaagcagggtctgtggcagtgcctggtaaaggatgattgattctgtcccaagaggaggaggcagttgagctggctttgagagtgggtggggttctgacaagcgtgtatatgtgtaagagagagggaagcagacagagaggaagagaaacagaactatccttgagaagacagagaaaatgtgatttgagggctattgtcatgaagtgatgagaggaggggaggtaagtgggttttgttttttgcgggttttatttttatttttattttattttattttatcttatttatttttttgacagagtctcgctctgtcgcccaggctggagtgctgtggtgcgatctcggctcactgcaagctccgcctcccgggttcatgccattctcccgcctcagcctcctgagtagctgggactacaggcaccccccaccacacctggctaattttttgtatttttagtagagacggggtttcaccatgttagccaggatggtctcgatctcctgacctcatgatctgcccgccacggcctcccaaagtgctgggattacaggcatgagccaccccgcctggctgtgggttttatttttatatccttttttttttctttctttcttttttttttttttttgaggtgaagtttcactctatcacccaggctggagtgcagtggcgcgatcacagctcactgcaacctccgcctcccgggttcaagtgattctcctgcctcagcctcccaaatagttgagattacaggcacgtgtcatgatgcccggctattttttgcattttcagtagggatggggttttgccatgttggtcaggctggtctcgaactcctgacctcaagtgatcccctggcttcagcctcccaaagtgctgggattacaggcgtgagccacagagtctcactctgccacccaggctggagtgtggtggtgtgatcacagctcccttcagccttgagctcctgggttcaagcaatcctcctgcctcagcctcctgagtagctgggaccacagacatgtgccaccacacctggctaatttttaaaacattatttctagagataggatctcactgtgttgcccaggctggtctcaaactcctgggctcaagccatcctcccgtctcggaccctcaaagtgcttggattacgggtgtgagccaccatacccggccaagtgggttttatgaacagggtgggtttgagctaggccctctgggcaggataagaaggtcttattttacgttcattttttacgtttatttagactcaggcagcatgtctctttttttttttttttttttttttttgagacagagttttgcttttgttgcccaggctggagtgcaatggtgcaatctcggctcactgcaacctccgcctcctgggttcaagtaattctcctgcctcagcctcccaagtagctgggattacaggcatgcgccaccatactccgctaattttttgtatttttagtagagacagggtttctccatgttggtcaggttggtctcgaactcctgacctcaggtgatccgcccgcctcggcctcccaaagtgctgggattacaggcgtgagccaccgcgcctgtagaaaaacatctcatcctataaaatagagtgaatctttccctaaatttatttttaacatacatacagcaaaatacagtgtttttggtaagtagtagatgttgacaaatgcacagaatgtgttttcaccgccaccatcaaggtaaagactgttccatcccccaaacgattccatccatgcattggccccttggaggtcatccctcccccttcccctcttggcatcccctggccacgctgatctgttcattcctataattttgcctttcaagaatgtctcacaaatggaatcatgcagttacatagctctttgggtctttgcttctttcactcagcaaggtcatagctcactgcagccttgaccacccaggctcaagtgtccctcccacctcagcctcttgagtagtggagaccacaggcacacgccaccacgcccggctcatttttgtactttttgtagagatgaggtttcgccatgttgcctaggctggtcttgaactcctggctcaagcagtccacccgcctcgcctcccacagttgtgggtgtgtgccaccatgcccagctgttgttctgagagttctttcatattctggatacaggttctttgtcaggacagtcagatatgtgatttacagatgtttggaggaaattagtttatggagaaaatcttcacaagatgatgggagtgaggaactctgaaagtgaggtgagagtttggtgtcctgagctgtggcctttctcacagtgcaagatgggaccaggaatgaggagtggggtacacctagagaatgacatgaaaaagaggagtcacggggccttccaagaagctctgttcctggcgtagagcatggttcagaatgagaggcacaggtgggaattttggtttgccgggcatccttcctgcctggcgggctgcacctggtctgcagctaatggcctgctgggtcaggccgggctggccccatccagaaaaacaaatgttcatgtccagcctgcatttcaaccacttccatggccttgtttccaaaccggatgatcgtgccttctggaatgggaggcgcggtaactggcaggcctgcaggagtaaggtgctgggtgtgtggctggtgcaagacagaatcagtgggggtgagttttctgggtcagggtgggtcctctgggatggtaacctcagcctagggtctgagtgaaggcttccagctattgttttttcttttttcttttttctgagacggagtctcactctgtcgcccagaccggagtgtagtgtcacgatcttggctcactgcagcctctgtctcccaggttttcaaggtgccttagcctcccgagtagctggaattacaggcttgagccaccacgcctggctaatttttgtatttttagtagagatgggagtctcgccatgttggccaggttggtctcgaactgttgacctcaggtgatccacctgcctcggcctcccaaagtgctgggattacaggcgtaagccaccgtgcccggccagctttgagctgttaacagaatgtctgaaacatcataatcttccttcctatccctgaccaggcagggtggctctgggacagaagacttacatgaaaaatgaccaaggccaggatggatgccgcctcccacctcttgtccaagctcattctaaccccgcctgctcctatgtcctcagagccatggcccagtccagaggctcgagtcttcattcttccccctgggggtgcagatgcttttccagaggtgcttagggcgtagggctggagagtagggcagagctggagtcctactttcccggagctcctagtgccccactgcctccaggatgtcctgtggctccctgaggctctgggtcctggaaggcattccccggtgtggagactccctcttctgcctggctcctccttctcccagggcagggcgtgcaccgaggccccaccccagatgcccgtgctgcttggacacctggtttgggctgaccctcgggttctgacagggtgggatcctcctgcctgactttgagagcagctgattgagggcaaacccacccccgaggctgaggaaacaagtgtgctggctttgacggaattccagggcaagtgcttctgttagtcactcccgggctaaatctattaatattttcagatctgcattttcctaggacacgcctccttaaagtgaagccaattggtttggttgagtacttttgcctctcaagtactgtattttcataatttttgctttttgctttatttcacttttaaaattttgtatttatttattttttagtatccctgtcatggcaacttttgctttattctagaaccctgaagaaaggccccgaggagaaaaagtctctcaacccttaaaacaaacaaacaaaaaaagactataattttgagtagtttggggtttatagaaaacttgagcagaaagtagacttcccgtagatacattcttgccccgcccccagtcagtttctcctagtcttaacatcttgcatttgttgcaattgatgtacatttgttgcaattaatgagtcaatatcggcacattattattattattattattattattattattattattattattactagagatggagtcttgctcttgttgcccaggctggggtgcaatggtgtgatctcggctcatggcaacctctgcctcccagattcaagcaattttcctgcctcagcctctcaagtagctgggattacaggcatgcgccaccacacccagctaattttgtatttttagtagagacagggtttccccatgttggtcaggctggtcttgaactcctgacctcaggtgatctgcccacctcggcctcccaaagtgctgggattacaggcatgagccaccgtgcccagccagcacattattagagtccatagttcacattagggtcccttcttggtgttgtccactctgggttttggcacatgggtaataatgtgtacccaccattacagtatcatgcagaatagcatcaccgttccccaaatcctccaggttccgtttattcatccctccttcccacttctggcaaccattgatcttttgactgtccctgtagttttgccttttctagaatgtcatatggttggaatcatacactatgtggccttttcagattggcgtctctcactaagtaatacgcatttgagtttcctccatgtcttttcatagctcatttttttttttttttgagacaaagtcttgctctgtcacccaggctggagtgcagtggcatgatcttggctcactgcaacttctgcctcctgggttcaagtgattctcctgcctcagcctcccgagtagctgggactacaggcacgtgccaccatgcccggctaatttttatatttttagtagacacaccattttgtgttccaccaagacgccgggctggtcttgaattcctgacctcagatgatctgcccacctcggcctcccaaagtgctgggattacaggcgtgaacctccacacctggccatctcatttctttttttttttttctgaatagtattacaccctgccccctcccaaccttttgtttttgcaaatggaggcactgaggcccagagaggggaagtgactggctcaagaggcaccacgaacctgtggcaaagctgcgcttggaggctaatttgccttcctctgggtacctgtttccaggggcctctgggccgggcgctgttctggaactaaacctgtatcatcacagctttgtccagaggctgaggggaggccagggggcaaggcctctgttcaccacttgccttgacccacttcctgcatgtgttgggtggggcctgcagatacccacgcccctgacgccgaaggggttgggggtggggttcccagcttccacctccctgagagctgaggagatgggatgctgggtccaggctgagagctgaggagatgggatgctgggtccaggcaagtactcgccaccccattgccgcccgggcctgggggctgggtgggaagagactgcttgggttgggcctgggctggggcctgcagcatttaggaatcttatctccctctgttgctctctgagctgcccctcccactggagactcctcccagctggcctgcatcccaggccatctccatttacttaatttacctcccctcttgctagcctgcaggcctcctgctccttcctctctgtcccgccctccatcatccctcctgatgactacagggcaatgaccgtgaatcacgtgcaaggagcccctttttgggccaggctctgtgctcatggacatgatggaattcaatcctcacagccgttatttggggagattgagattgcactggtgcctcttcagtggttgggaggacactgaggattagagtagcttgctcaggactcccaggtccctgtgaggctgggccaggatctgagctcaggcgtcttgagtccagagcccaaacgctaaatctctgccccaggcgtctctctctctctttctctttctccccttcctgctctctctccctttcccccttcccttctttttcctctctcttttgaccaggcattgctcaaggggtccagctctctgacttttgttccaacatctccttagcctgggaaggattgtggggcctccccccctctcacctgctccccgttccccatcctgtcctgaagccaggtgtgatgaaggcctcacaccaaaggatggccgggaaggtgctgccgtgcattgccttgcaggggctttacttgcttttctcaatcctcagtggctctgcaggcaggaatgctcatccccatttgacaggtgatgaaacagaagctttggggaggttcagtaagttgctgaacagctgtgcaacgtagctggtgagaggcaggtttcactcaggtcataggactctgaggcgtctttaacatgtcccggacttcacgtggcctttcccgagaacttgttgcatttcaggagaggaaggggcactgctcagcaagaggaaggcactccagtggtgggagctcaggccctgggacacctaggttttcttggtcttgttttctgagaagggcccttttttggcctccggcaggccctggcccttccgaaatcacaatgggatctgtttgtttctaactgagtacacagcctggcccggcccagcccaaccaaatccatttctctgctgggttctttccttctccaccaatccctttccttccatccctcgggactcacctgcctgtgacctggggactctcctgtccttctcttttcttttccagctgtaaccaggccctttcctttgctcctgtatttcgggcccaggtcccctgcagaccctcttttccttctctgccctcttctttttgtcttctatctcctggtgcgctttaaacaatttttttggtgaaatatatgtaacataaaatttgccatttgaactccaagtgtgcagtttggtggcattaaggacattcacaattgtgctgcagtctcctgcttccatctccagaactttttcatcttccgaaactgaaacgctgtacccgttaaacagtaagtgcctgttttttttttttgtctttttgtttttttttgttttgttttgttttgagagggagtctcactttactcactttattgcccaggctggagtgcagtggtgcgatcttggctcgctgcctccggggttcaagtgatttttgtgcctcagcctcctaagtagctgggactataggcctgcgccaccgcccctggctaatttttgtattttttagtagagacaggtttcaccatgttggccaggctggtctcgaactcctgacctcaggtgatccacctgcctcggcctcccagagtgctgggattacgggtgtgaaccactgcgcctgacaatgactgttaatgttatgaatgaaactccccattcccccatccccaacccctgatagtctctcttcggctgtctctatggatttgcatattctcagtacttcatggaagtgaaataacatgagatttgtcctttcatgactggcttgtttcacttagtgcaatgtccttaaggttcatccatgttgtagcctatgtcagaatttcatgccttttttgtttgtttgttttggagatggagtctcactctgttgcccaggctggagtgcagtagtgtgatctcagctcactgcaacctccgcctccctggttcaagcgattcttgtgcctcaacctcccgagtagctgggattacaggcacctgccaccatgcccggctaatttttgtatttttagtagagacagggtttcacattgttggccaggctggtctcgagctcccgacctcaggtgatctgcctgcctcggcctcccaaagtgctgggattacaggcgtgagccaccgcgcccggtctcattcctttttaaggtcgaatcatcctccattacctggatgcaccacattttgtttatccattcctctattgatggacatttgggctgcttccccttttgactatcctggtgccttttgacattctgtgctcaggaacagcagacagcacttccgcactatgcttgggaccacttgaggcagcaaaagcacctgcaaaagtgcagaagtcacagcactaaatagacccagaacaagacacctgcaggagagctgacccaggtagacgaagtgcggcgttgccgacctcagctgggagcgtgcgcgtcaggcagtgagaatttgtggctgctcagtgcacgcatgtgtccacaaatgactgtgaagatactgggagtagtgatttgggggttagaaattttagcaagttggcaaacttgcaagtacaaaatctgtgactattctgtgattaatgaggattgactgtacttgcatcttcatagatgactctccctccttccctcctgagatgacagcattaatccattcagcaaggcccaatcacatcttaaaggctccatctcccaacattcttgtgttggggattaagtttttaacccacgaactttgaggggcacgttcataccagagcagcgcccaatgcctgtcatatagtacatgcccagtgaacagtgagtgaatgaagggcacaaggactgaagtacctgtgctgagttgttaggcatgagaatcagcagggagagatctttctggcaggggagcctgttcctctcctccctgggaagaagccctctcctgtgctcactgagaggcatccagtgatggtcatggaggttggaattgtgtggcagaaaagtgcaggcctgagatgtagttctagtcccagttttaacaggttttgtggtctttggcaagtcagttcacctctcagggccttagtctcctcacttatacattggagggcagttttcttccccgagattctttccacacaaaccctgggaaccctgcctctctccgctgggaccttcactggaggccgtaggaacagtggggtccatgcaacgaaagagaccaagaggtcttcgtgtctgcagagatgaacttctctagctcccttagcctgccaatccaggctacccctccctccaactctgcacatctaacttgcatccctcgtgctgcagagtcagatcatcccccttcctattgtcaacagaagtgtttgcaaaataggctggatgtggtggcttacgcctgtaatcccagcactttgggaggccgagacgggcggatcacttgaggacaggagctcgagaccagtctggccaacatggtgaaaccccacctctactaaaaaaacaaaaattagctgggcatggtggtgcacgcctgtaattccagctactcaggaggctgaggcaggagaatctcttgaacctaggaggctgagattgcagtgagtccatatcgctccactgtactccagcctgggtgacagagcaagactctgtctcaattaaaaaaaaaaaaagttggcaaaataggtcaaagaagcatcatggccaggcgcagtgactcacgcctgtaatcccagcagtttgggagggcgaggcgggcagatgtctgaggtcaagagcgaaactccatctcaagaaaaaagcagcatcatgatgggcaggaggcagcttgcagtggggaagggcttcagagccgcagtctgagccttgtctcttactggctttgggctgggacacagcacttcaccttaggagcctcagcatcttcacctgccaaatggggcagtgcagctacctcaaggggatgggggcaggattggaggaagatgtagtcaagtgctttgcccagtgcctgatgcagagtgggcatttgaaactggcacctcctagtgttaaagtagtaaaacgtgtgtccctcagtgtccagggcacctctttgacactcagccctcccacaagtgctgggctgcctgtatccgtcctgcagggtcgcctgcccagtgcacaggggcttgcactgtgtgaggaggcagcacagcccacccggcactacctgcaggataggttcttctttcccgcccaggtcccctggcctcctccctttgtcttccagctcctgagtttccaagcttagttagcgtggaagacagcagacaactgactggccagagtagcacagcacattcaggcaatcagtgtagcagctcaggggcctctgggaactggggctcagggaacccttcagggtagagggggcctctcactgcacccgcttgtgccctgtacctacctccacccaagcctctgacactccatagcacttacctgtttgcatgtctgtctagtctcccatccccatctgaagtctgagccccatgaaggtctggacccttttctctagagtttagtccaagaacaggtacttcaagtaaagagttagttgatggactgttggcaggaattaaattagtactgaggcccaccctaagcagggaagcagtatgaacagacttggggctcaggagatggtgagaagcccaggggtgctggagggtagtggggatgcacctggaagaaggctggggtctgctgctcctctttcacctgtctcattttaagagatgatttctcttaaaatgaagagacttctccatttcttattttgagagatgaagcccagtgacccccaaaatcagggtgttttcttctgaattctctgtctcagctctagaggctggaggagttgtgaggggcttagggatcacagtggctgcagaaggctctgaaaggagggctctgggagcgtgagatggatcggactagggagaggacgtcaggttggcctggggtctggttctgccttttctcggggcaggtcctttgccctccctgaggcttggactctccatttggaacttagcatcctgattcccttcctgtcctgaaagtgtttttggaggagcttactgttctgagtattagggagatcttaataaaagcccatacattcctgatccttctggaaattcctgagtaattagcacctgtgggccctaggatggagcaacctgctgtcttctggggttgccctgggggctaccctgtagcttttggttggggctgaggcagagtagaggctcctgggctgggccctgagaaccaagtctgggattatttttactcttctgttcacagcgcatggcccagctccacgatgccatctgtcccccgcctccagctctcccctggcaggccctcctgggtcactgtggtgcacttggggaaggaggaggaggctggtgctggcttaccccattccatgagccgcagggcagggcggtgcgtgggaggtttgcctggtggcaggaggcagctgccagccccgggatgtgggccgcgggcagataggagaagctcgccagtgacggctgtgaacctggagcaccagggacacgtggggctgggagcaaccccatttcggtaacaaaccctgtggcccagggccttggatgacctgctgccctgcttttcctgggacagacccaatcctagggacatggagtgcaggtcctcagaaaaccccactcgtggggcagggtctggcattaggagtctttggttctccccaggtgtgtgttctgctgggctgccctaggcccaacttctgcagggactgatggtgctcacttcaccaggccagtccagctcagcttgggtgaaggaaggggaattctgaggaggagcagggcccagagaccatagaaggggtcaggtggggtaagggaggtggcggccctcctttccgtctcctgacatcctggcctccaccgcaccctccacctgactcagggcatccatctgtacttagtgtcaggtccagaagaaaatctaggctacaaccaggacttaagaggcctcaggtattaaaatgattaattaattaagtattaatattaggcattagggcttcagactttctacttggcattgtttatggcttagtaacaatgaagacaataagaaatagctcttatgagcactgactgtgtcaggccctacgctagatgacatctcactatgtcatctctcctgcgggacagccttccgggatggatcagttccccagccttctgagcagagccacacatgaaagtctgcaaggtacttctagaggccactggagacttctgggatctggggagggagtgtgaaccacagatactgctagcacagaaaggaccctggatcccaaggagggcatccttcttgttttacagataagcaaaatgaggcccagaaaaatgagaggtggtttgtctgtggttgtgtagttggtggtagaactggaaccaaagccaggctcttgcttcccatacatcacacttccattctacaagcctccaaaataagccccaaagggatttatgcacaattcaagctctttttctggtatgccaaaatccagacatttcctgaggtttcttttgtttcccaaaactaagcacagagcaatctgttctccccacagagaaatcattattccacaataacacttaacaaatatcccttcgtttgttcattctgtgttcatcagctctgtgcagcgtgctgaggacttacagaggaagacagctgtccctgtccccatggtgtctaaagtgtggtggagaccagtccttactgggagatgggggctggatatggaaatgcaggaatctgctaaggttggagtcatcttcccagagggagtgacatatggctggaccttaaggctgagcaagagttggtccggtgaacaaggaatggaagggaagtttcaggtagcagcacctccaccaggagtggagaaagagcctagcatgttggggggtgatttggatggctgagtttggggcttggaggtgggttcaaagaaggaagtacagagggtggtgcctgtgtgcggaaggtatggccggagagcagggatcagcagatggaagcgctagaaaatcccatcatggagtgtgtagtgttatcttaagaacaaagaaaaggcattgaaaatttttaggtagcagaatcatgtgatcaggtttgcattttagaaaaatcactggctggggtgaagagattatggagcctgaatggggttgcaccaggtcatccagatgtgcatcgctggaagcttggattagggctgtgagatagagtagattcaggagacatgtaggcgacagaaagacaggatgtggtcattagttagatgtgggagatattaataagagggaaaagtcaaaacagtcatgtgctgcttcacgaaggggatgcctcctgagaaatgtgtctcttggcgatttcatccttgtgcaaccataatagagggtccttacacaaacctagatggtatagcctacgacacacccaggctgtgtggtacaacctattgcttctgggctataaatctgtacagcatgtgactatactcagttctataggcaactataacacagtggtaactctaagtgttagtatttgtatatctcaacattcctaaacatagaaaaggtacagtgaaaataaaatataaaagataacaaatggcacacctgtatggggtacaccatgaatggagcttgcaggactggaagctgctctgggtgagtcagtgagtgaatggtgagtgaatgtatgctactgtaggcttgactgtacactactctacactaggacattactgatactactgtagactttataaaaacagatacttaggctacgctaaatgtatttaaaatgatttttcttcaagaatatattaacttggctttctgtaacttttttactttataaacttcttaattttttgattcttttataataacactttaaaacgcaaacacctcacgcctgtaatcccagcactttgggaggccgaggcgggtggatcacgaggtcaggaggtcgagaccatcctggctaacatggtgaaaccctgtctctactaaaaatacaaaaaaactagccagtcgtggtggcaggcacctgtagtcccagctgctcaggaggctgaggcaggagaatggcatgagcctgggaggtggagcttgcagtgagccgagattgcgccactgtactccagcctgggtgacagagcaagactctgtctcaaaaaaaacaaaaaacaaaaaacaaaacccaaaaacgcaaacacatcgtacagctgtacaaaaatattttcttaatttatatctttattctataagccttcttctgtttacaaaatcttttttttttttttttttttttgagacggagtctcattctgtcccccaggctggagtgtagtggcacgatctcggctcactgcaacctccgcctcccgggtttaagcggttctcctgcctcagcctccctagtagctgggattataggtgcgcaccatcatgcctggctaatttttgtatttttagtagagacggggtttcagcatattggccagggtggcctcgagctcctgacctcgtgatccacctacctcacctgtttttttactttttaactttgtcgttaaaaacagagacataccagccgggcgtggtggctcacgcctgtaatcccagcactttgggaggccgaggcgggtggatcactacgtcaggagttcaagaccagcctggccaacagggcgaaaccctgtctctactaaaaaaatacaaaaaattagccaggcatggcggcggttgcctgtaatcccagctactggggaggctgaggcggagaattgcttgaacccgggaggcagaggttgcagtgagctgagatcgcgtcactgcattccagcctggggaacaagagcaatactccatctcaaaaaaataaaaactaaaaaaaaataataaaaacagagacaaacgcacacattaggcctgcacagcgtcagggtcgtcagtatcactgtcttccacctgcatgtcctgccccactggaaagcgtttggggcagtaactcgcatggagatatcatctcccagggtaacagtgtctttttctggaatgcctcccgaagggcctgcctgaggctgttttacagtaattttttttttacaagtagaaggagtacactctaaaatgatgataaaggctgggtgcggtggctcacgcctgcaatcccagtcctttgggaggttgagacgggccaatcaccagaggtcaggagttcgagaccagcctggccaacatggtgaaactccgtctccactaaaaatacaaaaaaattagccgggcgtggtggtacgtgcctgtaatcccagctactcgggaggctgagtcacgagaatcgcttgacctcaggaagcagaaggtgcagtgagctgatactgcaccactgcactccagcctgggtgacagagtgagactctgtctcaaaaaataaaaaaaaataaataaataaaatagatataataaaaagagacgacaaaaagtatagtatagtaaatagttaaccagtaacacagttgtttattgtcaaggattgtgtactgtacataattgtgtgtgctagacttttacacaacagacagcacaagtaggtttgttttacaccagtgccaccagacacgtgaggaatgtgtggcactgccatggtaggatggctctgacatcactaggcaataggaagttttcagctccattatcatcttatgggaccccctttgaatgaacgtttggggctgactgaaattttgttatgcagtgcatgactgcgttcctagctttctggtctctgtgtggatagtgagtggttcatttcctgagagagagccgaggaggtggaacaggatatggggacaagctgaacacttggttttgggcatgttgagtttgaggagctctggagattgattagagatgcctggtaggcagtttctgtgaggaccttcacctcaggaaagatacacagatttggggattaaaccaatagagtgggaatgcaagccttgggtggggatcccccaaggagtctgtttagggtttaaaaagaagaggtcaggtcagaacccagggacacatctttatagaatgagtctggtgaaatatggagcccagggaatatggagaaaggaagcctggagctgacttggaagactacagactcctcctgcttcttccatgtgttttcagaatcagcttgttttttttgtttgttttgttttgttttgttttgttttgtttttttgagacggagtctcactctttcacccaggtgggactgcaggggcgcgatctcagctcactgcaagctccgcctcccgggttcacgccattctcctgcctcagcctcccgagtagctgggactacaggtgcccgccactgcacccagctaatgttttgtatttttagtagagacggggtttcaccgtggtctcgatctcctgacctcgtgatccgcccgcctcggcctcccaaagtgctgggattacaggcctgagccaccgtgcccagcctggaatcagcttgttaagctttgtggaaaactgtgtggaattttttaaaatcacaatttcagggccgggcacggtggctcacacctgtaatcccagcactttgggaggctgaggaggaggatcacttgaggtcaggagttcaagaccagcctggccaacatggtgaaaccctgtctctactaaaaatataaaaattagccaggcgtgatggtggcacatgcctgtaatcccagctacttgggaggctgaggcaggagaatcacttgagcctgggaggtggaggttgcagtgagctgagatcacgccactgcactccagcctgggtgacagaacaagactccatctcaaaaaaacaaaaacaaaataaaataaaataaaaaatcacaatttcattgaatttatgatttatttggacagattcaacatcttcataatattgttttcccattcatgaacacagtttctctccatttatttaggtattatgacactgtgaaatacatactaggggtctggcgcggtggttcaggtctgtaatcccagcactttgggaggctgaggcgggtggatcacctgaggtcaggagttccagaccagcctggccaacatggcgaaaccccgtccctactaaaaatacaaatgcaaaaattagccgggtgaggtggcgggtgcctataatcccagctacttgggaggctgaggcaggagaatcgcttgaacctgggaggcagaggttgcagtgagccgagattgcgccactgcactccagcctgggcaaaaaaagctcaaaaaaaaaaaaaaaaaagatatattgggacttcattcagtgtcctgccatacaactcctaaaatccttgcaatcttcaaaacgatgtgtctttttgtatgctaatgagtcgatttagggcttgcagtccctaggtagcttcaggatgggaccagactccagaaagacaaagggcaggattagaggggtggaacttgcagccacaccctccaacctcagggaggcaagaggggctgaaggtcaagttgatcaccagtggccaatggtttaatcagtcatgcctatgtaatgaagccaccatagacacctagaaggactgtgttcgaggagcttccagaaagctgaacgggtggagggacctgaagggtggcgtacccaggagagaacatggaagcttctcgaaccgtcccacgtgccttgccctatgcgtctctatcctttgtgagatcctttagaataagctggtaaaggtagatagtgtttctctgagttctgtgagctactatggcaggttaattgatcctaaggagagggttctaggaaccccacctatagctggtgggtcagaagcacaggtaaaacaacccagggcatgggattggcatgggaagtcgggaggcagtcctgtggaaccgagcccccaccctgtgggatctcctggcttcaagcaaccctcctgcctctcggcctcccaaagtgctgagattataggtatgagccaccatgcccagccctgattttctcaatgaggctctttgattggtaaattctctattatttttgtctaaaaatgcctctatttaatcttcactcttgaatgattttttgtttgggttttaaattcaagattaacagatagtttcttttaacaatttggtgatgttatattgagtcttctagtgttactgttacgaagtttgctatcagtttgttgttattattgtttttgagacagaatctccttctgtcgcccaggctggagtgcaatggtgcaatatgggctcaccgcaacctctacctcctgggttcaagtgattctcatgcctcagcctcccaagtagctgggatgacaggcgcccaccaccacgcccagctaatttttgtatttttagtagagacaggggtctcactatgttgcccaggctggtctcaaactcctggcctcaagccatccacctgccttggcctcccaaagtgctgggattacaggcatgacccaccacaccagaaagaagttcaatatcagtttaatagtccttcctttctagataatctgccctttttcactcttcatgcttttaagatctctgttttgggtattctgcagtgtccctacgttatgtgttccttttatttgaatttatcctggttaggattcagcatggttcctgaattattggagtcatgtcttctattaatctggaaaattgcctgctgttttctcttcaaatgttgctctactgtatttattttctatgttctctttttctggaattctgatgttgaattgccttattctgttctccttgctctttactgtcatttaaaaaatacatctgggtaatttcctcagctctgtcttccagattgttacttctttatctagctgtatctaagttgttaatcccaaccattgggtttttaatttcagtgactaaaatgtttatttttaaatgtttgatgtagttctttttccagcctactttgtagttttgataatatcttattctttcccatatttacaattccttatttaggtcaataatcatttaaacataatctcttcagagattttcagcctgggaccactgtttatttttaagaattggctagaggttactaagcgatataaaattcaaatttcaaatccattaaagggtaggcccttggttacaaattcttttttttaagaattattttttatatctagaatttaggctaagacagataatctttttttttttttttttttttttttttgagatggagtctctgttgcctaggctggagtgcagtggcgtgatctcagctcactgcaactctgcctcccaggtacaagtcattctcttgcttcagcctcccgagtggctgggattacaggcgtgtgccaccatgccaagctaatttgtgtatttttagtagagaagaggttttgccatgttggccagactggtcttgaacagctgacctcaagtgatccgtctgtctcggcctcccaaagtactgggattacaggcatgagccacttcgcctggcccagagaacgcctggcccagagaatcttcgctgtcatattttgtcagtgttctactggttctctgaggatttaggtatagttcccagtttcagcttctctgcatctcttaggtctaaggtctcatctctgagcaaccattaaaacccagttgtgaccaggcatggtggctcactccatgggaggccaaggagggagaattgcttgaggctggaagttcaagaccagcctaggcaacctagtgagacctctgcagtaaatacataatctctacagtaaataaataattagccgggcatggtggtgcgtgactagagtcccagctactcaggaggttgaggcaggaggatctcttgaacccatgagttcagtgctgtactaagctatgatcttgccagtgcacttcagcctgggcaacagagcaagacactgtctctaaaaaataaaaaataataaaaatttaaagtgatgaaaaataaaaaaccagcttcctcattactaagggagctttgctcagtcgtttctaaatttatttatagagtgagagttttaaaatcatcttatctactatattgccagaaattaaagttggcaactcttttaagtagtttgtttcaggctgggcatgatggctcacgcctgtgatttcagcactttgggaggccgaggtggatggatcacctgaggtcaggaatttgagaccagcctggccaacgtggcgaaaccccgtctctactaaaaatacaaaaatcagctgggtgtggtgatgtgtgcctgtaatcccagctactcagtaggctgaggtgggagaattgcttgaacttgggaggcggaggttacagtgagccgagattgtaccattgcccaccagcctgagtgaaagagcaagactccgtccccccacaaaaaaaaagaagtttgttttggaagtatggaaaaatgttttcatgttcaggatagaatcaagaccagaatttctgatgagaataagctagtttattcccgaaaaagcgactctgcccccaaactctcatgaaaacttactttaacagccacagagacaacaggcaacacttgttacactaaaaaggccagtgactctgaagggctgagaacaagaccttgacctgcaccttggcctcactgcgcgaccttgggcgtgtccttaggcctctgggcctcagtgcccttttcagcaagctgaaggagctgcttaggtttcctgtggtgggggttggggggggcggttcctgcttttttttttttttttttttgaggcggagtctcgctctgtcgcccaggctggaatgtagtggcaccatcttggcccactgcaacctctgcctcccgggttcaagtgattctctggcctcagcctcctgagtagctgggattacaggcacccgccaccatgcccggctaatttttttatttttagtagaggcggggtttcgccatgttggccagggtggtctcgaactcctgacctcaggggatccacccgcctcggcctcccaaagtgctgggattacaggtgtgagccactgcgcccggctggttcctgctttacgtgtcagtggctctaacctctttcccactgcatgtctgtgccagctgctttgccaagctccttttgacctctcctcctgggatgtgcctcccacacttagcccctccctcccctcgatcctcaccccctccctcacagtgcctctctgtgaaggaaattgtccttctcacaggccatgggtgggagatgaggggtttgagggtatggagggcaatgataagcgaggaatgctctgggaggtcccacttcagaggatccgaggtggaagtggtcgaactcaggggtttagacccccagcctgggtttgggctgctggactgcattgctcctcaaggctagtgggggagaagggacgggcaatgtgtgtgacgcggtgaggtcctcctttacaagtggactcggtggctgggatggggagaagttgggggctctgcgagggctgtgggaggtacgtggttcccagctggtactcataacccaaaaactgccttaagattactggtatgtcctgctccttcacaaacccctgagaactatgtttggaagcttacagcttggatggttggagccaagaggtcactggatttgtctcatgttaggggaaggtggggttgtgaccatgagcctccagaggcaccagaaagtcaatcctgccgttgctccagtgtgtgaggagctgccaagactgtttctttcagaaagagcctgagttgggaagggaacaggagaatagtgacctacattatattgtatatgcgtttttaaaaatttttcattgtggtaaaaaagaccacaaaatgtaccatcctaaccctcttgaagtatccaggttggtagtgttacgtatattcacaatgctgcgcagcaggtctccagaacttcttcatcgtgcaaaaccgaaactctgtacctgtcaagtcacaactctgtgtctttctcccacgagctcctggtaaccaccattctactctgtttctatttgtttgaccacttaagaacattttgtaaaaaaaatttttagtagagatgaagtcttgctaactcctggactcaaatgatcctcctgcctcagcctccctaagtgctgggattacaggtgtgagcctctgcaccctgccgactactttatttttattttattgtattcatttattttgagacagagccttgctctgtcacccaggctggagtgcagtggcgcaatcatggctaactgcagccttgacttcccaggctcaagtgattctctgccctcaccctccagagtagctgggactataggtgcgagccagcacacctggctaattttttttaaattaattttttgtagagatggggtctcccgatattgcctagactggtctgaaactcctgggctcaagggatcctcctgcctcagcctcccaaagtgctgggagtataggcatgagccactgtgcctggcctaatgtgactgcttagatacctcgtcagcggaatcatgcagtgtttgggttgttttgtaactggcgtgtttcactcagcataatgtcctaaaggtccgtctgtgctgcagcacgtgtcccggttgccttcctttttaaagctcctatttcgctgtaggtatacaccacattttgttcatgcattcatccattgatggacacttggtttgcttctaccttttgactcttgtgaataatgctgccgcgagcatgagtgtacatatatatctttgagaccctgctttcagtttgtttgggtatatacccaggtattgggtcatatggtcttgctctgtcacccaggctggagtgtagtggcgggatctcggctcactgcaacctctgcttctcggattcaagcgattctccttgtctgagcctcccgagtagctgtgattacaggtgcccgccaccacacctggctaatttttgtatttttagtagaaacggggtttcaccatgttggccaggctggtctcgagttcctgacctcaagtgatctgcctgcctcagcctcccagagtgctgggattacaggcgtgagccacagcgcccggcctgtaccattttgcattcccaccaacagtacccaggattttgcatgctttttgcccagggtcgatttaatgtcagtgcatccccggcactgcatccttgtctcctacttttcagcccttgtctgggttccttgataccagggagtgcctaggtcattgtgctcattcgacagatgggaagatgagctctccagaggggatgggacctgttcaagaccccaggcctgattctcacagatctttcacttcacgctttgcttcctgagcaactgattcgggctctggcactccccggagtgccttcatcccgtggcccacgcagttcttccactgctcaccggggctgtggttcctgtccccacaggtccaacgagcgctcctccaagcggagccttggagggcacggccggcaccattacctccaacgagtggagctctcccacctcccctgaggggagcaccgcctctgggggcagtcaggcactggacaagcccatcgacaatgacgcagagggcgtgtggagcccggatattgagcagagtttccaggaggccctcgccatctacccgccctgtggcaggcgcaaaatcatcctgtcggacgagggcaagatgtatggtaaggagcccgtcgggttcagccctgtacctgaggctgaggcaaggggccgacaccagaaccttggggttcctgccgggccacagaaggggatgaccacttggggctttgtcgggtggacactgctttcttccctcctgggctcccaagggatgggggcatctgaggagaagcctgtgagggggtgtggagggtggggcccctggcggtgagcagagatgggagtgggaatcttggaaaaggcgaatctgggtggggtagaacatccccccagagcaggtggggagcaccccacaagctgtaccccagcaggtgcctgaccagcaggctgcccaccttggctgtgaaggatgctcactcatcccctctttccctcactcattcatgcaacaaacagatgccgagccttctgtgtgcctggtgtgggttagacgggtctagtcccagcctgtcatctggggtgagggtaatgtgagctcacagatacctgctctgcaaggcagcctggagagttcctaggagaggcagagtgctggagaccactcccctaggaaaggccccccccaacccagcagagggtcaccagaaacggcttgatctttgtgagtggctggggttgcagaacacagctgaaactgttcagcgatgcatgggaaggaccaagcagttggcatggggccacgatgacttttggatggaagagggggcatctggaaaaatgaagcaggggctgggcatggtggctcactcaagcctgtgattccagcactttgggaggccaaggtgggaggatcacttgaggccagcagtttgaaaccagcctgggcaacaaagcgagacaccatctggagtaaaaataaaaaaaattacccaggtttggtggtgccagcctgcagtcccagctactggggaggctgaggcagaaagatctcttgaggccaagaggtcaaggctgcattgagccatgagtgcactgttgcactcctgcctgggtgccagagtgaggccctgtttcaaaaaaaaaaaaaaaatgaagcaagaataaaaactgaatggctgttggaaggcccagataaggcttctgttcctgttggaaagtcctctaggaatcctagctcaaaacagtggtcttggggcaggagtgagagccctgagtgggtctctaaatggctgaagtcagtgacaacggggcccctgcctggcttccaacaggatggccccagaccagctgcccacccccacgggtttccattcatttctcccccacacccaacgctggtgccacccccaccattgttgcttggctcggcttccccagggtcgcccttacttctgggtcggccctctagactctccctgctttgaccacttcttgctctgatggttgcttattttttcctttttcttttctctctctctctttttttttttttgagatggagtttcactcttgttgcccaggctagagtgcaatgggcgcaatctcagctcaacgctacctctgcctcccgggttcaagcgattctcccacctcagcctgccgagtaagcttggattacaggcacgtgccaccactcctggctaattttgtatttttagtagagacagggtttttccatgttggtcaggctggtcttgaactccagacctcaggtgatccgcccaccttggcctcccaaagtgatgggattacaggtgtgagccaccgcacccagcttttcttttcttttcttttgtttttgagacagagtcttgctctgtcgcccaggctggagtgcagtggagcaatctcggctcactgcagcctccgccccgtgggttaaagtgattcttctgcttcaccctcccgagtagttgggtctacaggcgtgcgccaccacgctcggctgattttacaggtgtgagccaccatgcccggccttgcatctgtatttctaaataaaatacttgaatgtgtttgtggcagttaagataaaatttgtctttaacagatcccaaataacagtggcttacataagggaaatttccttctctctcctataaatgtctggagggtaggtagtccagggaaggtgtggcagctctgctccatgaagctctcagggacccaggatgcttccgtcttgtggctcatgagcatgccttccattgtgaatgttcccttaaggcccaagcagctgcttcagctccaggagttacattgcagctagcagacaggagaatgggatgaagaagagtgacctggatacatttaaggaagacactgggaaactaacccctgaaatatttactggccagaactcctgtgaagtcccttccacctctacttgtgaagttctgcttcttacttttagcgcctggggaagcgtcatgggggagacagctgtgtgtggagcacctgggggtgcctggtgtggtgttcggtgctttgcagaggttgttgccatttagccaggagggacgcagcctctgggaccccccgggctctgctttggtggaggaggggatgggtatagattgtagcttaggtgtgaaatgagaaagggcagggggagtgtagggaagggcaggtggcttggctggggagctgtggtgtatgtcctggacccttcacagggcaggtctgtgtgctttagagacagaggtgggccggaaaacgaaagtgtgcatgaggcatccagcaaggggcaagggcggagggcgctgtgggtgtctgggagggccccgtggagatgctagaatgcactaaatcaacagacatttgtggagttgagcacccctggggaccaagggctttgaggacttgctttttcggggggggggtgtgtgtgtgttaaaaaatacgtaacattttccattttaatcattatagtttttcagtttataatttgatggcattaaatatattcacattgatgtacagccattactaccacccatcgccagaaatatttcatttcaaagtgaaattctttaccttttaaacaataattccccattctcgccatcctccccgccctccagccctggcaactgccattctgctttctgtctttatgggtctgactcctttagttacctcatgtaagtggaatcatacaacatttgcccttttgtgactggctaatttcacttaacacaaggtcctcaacgtttatctgtattataacctaggtcagagtttccttcctttttaaggctgagtaatattccattgtatagaccacattctgtttatctgttcatctgccgacagacatttgggtggatgcttagttttatttagttgttataggtagatatttctgtccctgcttcacatataaagatactggggttaagagaccgtgaccaaccctggggaagcgccgggctgtggatctctggcaggacttgggttggaattctctttggcaggagggaagccactgactcagggaagcagactgaaaatggtttggcaaactgtcctggccgtgttggcatctcggatgctgctcctcccctgtgctgagacccagggaggggcatgggatggggacgctcgggagggcctggaggaagagtgaggagaggcagaggtgctgcttcactgtgcttcataacacgtcagcgctcccagcatcctgggcatctgtgatctttcggtcctttcaacggtcccttcaaggagggaggaatggcacctctgcttgcagatgcagaaatggaaattcagggaagccaagagtttctcccagtctctcaagttggaagtggagagtggggctttaacccagttctcctgcctccgagcttggcgttcctctgtcagctgaatggccttgctcctccactgcctggccctggctccaggtgggtcaggccctgggcagggccctggaggctgtactgcaggctctgacaaccgcccagcccccacagcacctgtcctgcatgagaataggttctgctgggatccagacacccgctcaccccgtctcttcttaccagtcccgggggccgagccaaggcaggactgcgtggggactgatggagggctctcagcaggcagtgctgaccagcccggctgggagctatagatagctctgagctcacccccagtgtgtgggatgggccctctgggaggcggaatgggaggccgagctgagagctgactcagacctcagctcaccgtggctgctcccctcctgtcttctcatcttcccttggggcatctgcgcttcccatcctctgtgtaccccagccccattctgagcccccagctgcttctagcatccccagagctctggtcttttctcccccctcacttccctgcatccaaaggccaccagcccctttccaagtgggccggcccggtggggtatggggtggggctaagaggatgattcccgacctggggacccggccttagctgtttgaggacaggggttaggcctgctccgagctccgcccacggaacatccagcataggacacgctgaccaaggccaggcagacatgcagatgacatgcaaagcagcacggcagattaacacctgctatttctgagctgagtctcccacgcttgttggctccagccctccccttgagcacctcttaccctcctgggccggctcccgagcccggggtgcttgccttctcctgctcacggccgctttcatttctgccctgtcactgtgtgaccctccccctggcacagccaacgctggccaccctgacctcctttggccaggctcacagtcggcctagcctagcgtgcaggtggtgggattcgaacaacttctcgcccccttctgcctgctccccgccttccccgctcctcacactcagtgctggccgggtgggctcgtgtcccgcctcctgctctctggagggctgtggctggctctggggttccctctgcattcatccctttctgcctcctgtgcttctcaccttcctgaggttgctcttgactttcccgagtcttcctgcctcttttccctgcctctctctctgcttctcccctcctgtgtcccaggtgggccatcctattagcagcccgtcagttctcattaagtgaccaccccacactgggcaggccgggctgaggccgtgtggtctctgctctccacaacttcatggtctaatgagaggggcaggaaaaacttctctggacagttagccacccaagcagacactggggttgtccacagccgatattaaccagatttatcttgggagttttcctgaaggaagcagagctgagggtgagtgcttgtcttggtctgttttctgttgttgataacagaatacctgaaactgggtaatttataaagaaggagtttattccttacagttacagaggctgggaagtccaaggttgaggggctgcatctgtgagggccttcgtgctggagggaactctgcagagtcccgaggtggtgcaggcatcccgtggcgaaggggccgagtgtgcttgttcaggccttttcttcctcggagacagcccccagtcccactcctgcgctctgttagctcattaatccctgcgtggattaatccatcgtgaaggcagtgccttcagggccgtatcactccttaaaggcccacctgtccatactgccacatgggggattacatttcaacatgaattttggaggggactaatattcaaaccatagcagtgctccaggcaagggggtggagagattgtgagcatcagtctagaggcgagacttcacatggtgggtttgggggaccctggtggaggatctgggcaaagcactgttggttcgtcagactgtcagaggtgaagggattccctcgttttctggatgagtcacacagctaataagaggcagaaccgggaccagactcagcctgagtttgggactagatagagcacgtcgagggtcttttcacaaaggtgatgggacagaggtcacggagtttcacctgggctcctgccccccgcttcttcaccatggcctcatttgcaggattctctgctcctctttgctttgttgccctgtgggtttccagctgctcctatgctcctccctgcggcctacaaccctgacttcaggtgcctggagacttgatgacgggagtgttcaaatctactctgtccctgagagctggcgtgaccttgggcaagttatttaacctccttgggcttcattttccttttgtaaagtggaggtcataatactactacctttgtgggaggtgatttggtttatttattttattgtgagaaaaatatacattacgtaaaattaaccatttaagccatttttatgtgtacaggtcagtggcattaagtacattcacctttttgtgcaaccatcatcaccatccatttccagaacttttccatcatctcaaatagaaattctgtacccattaaacaataattccccattcccctctgcccctatagccgctggtagcctgttctattttctgtctctatgatttgcctattctaggcatttcataaaggtggaatcaagccagccgcggtggctcacgcctgtaatcccagcactttgggaggccgaggcgggtgaatcaagaggtcaggagtttgagaccagcctggccaacatggtgaaaccctgtcactactaaaaatacaaaattacaaaattagccgggtgtggtggtgtgcatctgtagtcccagctacttcaggggctgaggcaggagaattgcttgaacccgggaggcggaggtttcagtgagccgagatcatgccactgcactccagcctgggcaacaaagcgagactctgtctcaaaaaaaaaaaaaagtggaatcaggccaggcgtgatggctcatgtggcttatgcctgtaatcctagcactttgggaggccaaggcgggcagatcactcgaggtcaggagttcgagaccagcctgaccaacacagtgaaacccgtctctactaaaaatacaaaattacaaaattagctgggtgtggtgtgcacctgtaattagctactcgggaggctgagccacgagaattgcttgaacctgagaggtggaggttgcagtgagctgagatcatgccactgcactccatcctggatgacagagtgagactccatctcaaaaagaaaaaaatgtaatcatacatatttccccttttatgtctggcttatttcagttggcataatgtccttaaggttcatccatgttgtagcgtgtttcagaatttccctcttttttaaggctgggtaatattccattgtatggagagactgcatcttgcttatctgttcacctgtggatagacatttgtattgcttctactttttgactactatgactaatactgcagtgaacattggtgtacaggtatcttgagtccctggtttcagttcttgtgggattggaattgctagctcatgtggtaattttatgtttgagtttttgaggaaccaccaaactgttttccacagcagctgtatcagtttacattcccgccagcaatgaacaaaggttctgatttcgcatatcctcatcagcgcttgttattttccattttttggatcatagccatcctagtgggtgtgaagcgctatctcgtggtttttgatttgcatttccctgatgattagtgttgtggagcatctttccatgaggttattggaataagacattgccttctagtgttgtcgtagggatgagagcacacagtaggtgccaaatgcacagcacggggtgaggggaacacgtacctgccctcaaggaactcacagtgtggcgggggagcatgactaggacagacaccgaggcaggaatgggcatgccctcttgggtggggagcagtgcaagcttcttggggcttcctggagctgtggccttgaagcctggctgatttcaccagaagcctcagagccctccagggacaatggtaggaacagctcaaatgtcaggcccaattgctgccttctcaggcttcagtcagaagttccttctccacaaatagcctccttctccagccccaggtgtttatggcttcagttgatccctggatagctgcacccccaacacacacaccctggcccccgcttccaggccattggggattagggtggggcagcaaggatgtgcccagcctcctctccctgagccccaacctacaggggtgcagtgtggcacttgctcactccaccagaggcctacagtgaaccaaagatgtccacgcacacttccacccactcttgggtggggaggcttgtgctctcagctcctcagtccttttcaagtttgaaagctaatagcattcgttataatagggcttcgttaacaatattaacagtaatcgctgaccttgctggccctctgctgagtggtgcgtgctttacttactccatgccatttaacagtttatggtctagggggtgggctgccatggagagaggggactcagcacagaggaaatgagatacagaaatgacctagcccaggcaggattttgcagctggggtaacgttttcagtggtgctatgtggcggaggtggccggcagggtgtgtgtgaggctgagtgtggggctaggagaaagcggagattcctcctggatgctgcatcaggaatgctccaccctcagcctttaggccaaggctcctgtttctccacgggcagccttcgcccccggtggggtggggccgtgggtgtgagctgggggctgtcggacacatgtgctctgacagatggacagatgggcccacagtctggcaggggtgtccttcccatccccacccaggccggccctggggttggccgaggccacctgccacgttgcaatgcgcagctgcctgactggcctcctccttccccagcctgtgttctcagccaccagagggagaagcctgtggttatgcagctaggggcagagctgggacaaggacaaggacaagcccctcccaccgccaccacctcagctgggtgctttacaagtttctcactgccatggcccttctttgccggccttcactgtggttcccacactctacctgtaggcccacgctccctactcccttcccctcttgcccctgactctgggggccttctggtgtctacatgatccaggatacgctggctcccaccagctgtgggtaccactgtccatgagtggtgggcaggacctcaggtccaagtagttggatctccctccgggaccttacctcatgcagagacttaggaatcggggggattgatccaaagggaaggagcagcatcgtcccttgcggaggaagctcagccctgtcgggggagcatatcctggggggaaatagccagcatgtaatactctcgaagcactggggcagccttggaaaacataccttctcgtggtgcctgggacactagcaagccatgagactgtgaataagtcatttcccctctctgggcttccatttcatcttcatcaggctaaacaggacctctagagtcacgtggtccagccctgcttctgagagaagtgacctccaattccctgttcattcggagtggtaccatgcagtagccacagatgggcactggcaccagactacatggacccgaatctcagccacatgcttgcctacgaccctgagaagatttctcaaccttgctgtttccctgtctgtagcgtggatgacagtaccaccctcatttagctgttgtgaggatcgaaagggtgaatgcagataaagctgtcacaggatacatatctgtatccgcacagatacttgtactgatgaggtatgcagcaagtgttcattgtcatcaagattttcacaggagtgacaggccacggcagctccctctgtgtgtaaagcctggattagatgccagctggcctggaggcagggagatggctgcgttgacctctagagcacccctggtggcaggaaggaagctgcttgggtccccttggctcacacacccacagacaccccacacttcactccctcacggggggttctcaactgccggcatcacccctgaccagcacaacgaggctggagggtctgagatgagccagcaagggagaggaggaggaagctccacagacagccagggaaaagcacaactttaacaaatacaaacctggaggacagtatgccaagtgaaatataccagacgcagaaggacaaatgccgagagggctcacttagaggtggaatctaaaacagtggtgctcacagcagcagagagtagaatggtggttactggaggctggggcgggcatgacggggagatgttggtcaaagaatatagtttcagttagatggggaaatgtttttggtttctagtttttgtttttccgttttgtttgttttagacaaggtcttactctccctccctggcagaagtgcagtggtgtgatcacagctcactgcagcctcaatctcctggactcaagtgaccctcctgcctcagcttcctgagtagttgggactacaggcatgtgctaccacgcctggctaattttttatttttatttttattatttttatttattttgtttgtttatttttttttgagacagagtctcgctctatcgcccaggctggagtgcaatggtgcaatctcggctcactgcaagctctgcctcctgggttcaagccattctcctgcctcagcctcccgagtagctgggactacaggcgcccgccaccatgcccggctatattttttttgtatttttagtagagacggggtttcattgtgttagccaagatggtctcaatctcctgacctcgtgatccgcctgccttgcccacccaaagtgctggaattataggcgtgagccaccgcacccagacttatttttatttttttgtagagatggagtgggtttcactatgttgcccaggctgatcttgaattcctgggcttgggcgatcttcctgcctcaggctcccaaagtgctggggttataggtgtgagtcatgacgcccagtcaaggaggaatgtttttggagacctattgcccagcatggtgactgtagcgaataataacgtattgcatttttcataagttgctaagaaagtaaatttcatgttctcatcatgaaaaatgataagtatttgaaatgatgggtatgttaattatttgattcaatcattgcagattatatacgtatatcataacatcactttgtaccccataaatacaggttgagcatcccaaatctgaaaattcaaaatctgaaatactccaaagttcgaaactttttgagatgtgtgcctcgaaggagatgctcgttggaccgttttggatttcggattttaggattagggatgctcagctggcaagtatatagtgcagatagcccccaaatttgaaaaaaaccccaaatctggaacacttctggttccaagcattttagataagggctagtcaaccagtatgtacagtttaaaaaaagaaagaaaagccaggcgtggtggttcacacctgtaatcccagcactttgggaggttgaggtgggcagatcacctgaggttgggagttcgagaccagcctgaccaacatggagaaaccttatctctactaaaactacaaaattagctgggcgttgcctgtaatcccaactacttgggaggctgaggcaggagaatcacttgaacctgggaggcggaggttgtggtgagccaagatcgcgccatttcactccagcctaggcaacagagcgaaactccgtctcaaaaaagtgaaaaataaaaataatcaaaaataaagaagaaagaaaaaaaatacaaagatgggccgggtgtggtggctgatgcctgtaatcccagcacttttggaggctgagatgggcagattacttgaggtcaggagttcgagaccagcctggccaacatggtaaaacctgtctctactaaaaataacaaaaattagccaggtgtggtggtgtgcgcctgtaatcccagctacttgggaggctgaggtgggagaatcactggaacccaggaggtggaggttgcggtaagccgagatcacaccagctgcacttcagcctgggcgacagcgagactccctctcaaaacaaaacaaaaaagaagacggctgagcttgccttagaccccttggtgtggctcctgtcccgccccattactagcctctcgccgggggctgagacggcctttctagcagcagagccctggaaccttgtggcagagggtgagggtagttgtggggtggtgggcaggggctccttgcagaggctgagtcctctgtgatgtttggggttagggtctcagctgatgggggccaaggcctccctactgcttctcaccacaggctgcagaggaagcagcactgttacggggcagtcctgcctgatgagaggaggttccattaactaagcatcctcgcttggccaggcctcgggccatattcaagcacctgagccaagagtcacacctgggcagttagtcctaggtctgctgtgggtgatctggtgcagttctctggcaaataggtataattacctgcccactgcagggaggaggtggatttactgtgaagttaatgaggtttacgcgttaggacccagcacttacatgggccccttccaagtccctaaacttaatttttgcttcattgaagtataactgacattacaacaaactgtacatgcttaaagtggccaagttgatacattttgacagatgtatgcacctgtgaagccatcaccaccatcaagataatgaatgtgtccattgcccccaagtttttaacctaattttgtatttttaaaattctttttcccaaagggagcctcccaattgctaaatgtcttaggcctcacaaaagtctgggtttgctcatgtacagaaaagttcaatgagaccaggataggacagcgccttaagagttacgtcggactaatcagaagtaaaaggttatttgcatgtatttaacttactcctttgtcttagaaggctaaaacagttacgggacatctgaccagcatcttagcattcattccctcatcattcaggcagcaagtatttattgagcgcctacaatgtgcaggcagttttctaggtggtgggtataaataagtgaataaatagaccaaaaatccctattcgcatggactgtggttctgacgggggtgagggcacagacagtactgaaataagttagattatgtattatgctagaaggtgctgtggaggaaagtaaaggcagtgggtgccagggtgggcgggtaggagtatgatttcagccctcagtggggtggtcagggaagagacagtggcacccaaggggtgcaggtggtgtgggactctggggcagagtgttccctggaggagaaacaggaagcacaaggaccatagtggggcaggtgtgggcctggtgtgtttcaggacagcaagaagtttaggatggatcgggtagactagatcagagaggtgactgaactggggtggccagatcctgcaggggtttccaggccgttgtaaggacttggacactgttaatctggggcagatggaagccattggagggcttttgaatttcgatagggtcgctgcagctgctgtgttgagcatagacttggagcagggaatacaggtggaaggtgatgatcctaatccaagtcagagatggcgggagcttggaccctggagggtgcggtggtgcacagtggctgtatgaattctggatatgttttggaggtagagccacaccagactcattcattcattcagtgagtaggtgccaggtactggagatgcagacttgaatggaggcatagtctcttcctctgagctgttgagagtctaacaaggaaagacagacatggataactgatgagcacacgatatcctgtgtgcaagggacgggccagaggagcaaccaagaaccgtatcccagatggtctgccatccccatccctcctgctacaccgtcacccacttcgcagctcttgggaacctctcttcttccctcatgcttttccttgcccgtagactagtctctgagctgggttacttacttgggcctagagcatgttcattttaccgaaaaggatactgagccacagagtgttctcactgagccagcgttgaggtctgtttcctacatctgtagaaatttggaagaatctgcgggaaaaaccttaaaggaactagatttaagaagagacggctgggctgggtgcagtggctcacgcctgtaatcccagcactttgggaggctgatgcgggtggatcacttgaggtcaggagttcgagaccagcctggccaacatggtgaaactctgcctctacttaaaatacaaaaaaattagctgggcatggtggtacgcacctgtaatcccagctacttgggaggctgaggcaggagaatcgcttgaacccgggaggcggaggttgcagtgagccgagatcgtgccattgcacgccagcctgggggacaagagcgagacttcgtctaaaaaaaataaaaaataaaaataaagaagaagagaaggctgagtgaaagtccttaaagggaagagacttaccgtgctcccaaagctcattggtggagctgccaggctctagcctggctcaccagctcccaggtctgtggccctacttcattcacccaccggtgatgacttagacccgagatgctgcatgggtggctttagttagacctggggtagaactgtcgaccgttcactggaccgccaaagcctttccctagaaagctttgagaggagacatcttgtggactcagggtttcaggtgcagatcagaccacagacagtgtccccagactccgattctccccccactccttcctctgacacagacgaggcagtggtcccaggccagcacaccttttctggcagacagtacctctggagagtagcctcgtaattcggccttggcattggggaaaggtcagctggggggtcagcttggccttggccgtgcactctggttacaacccaggtggcaggcagcccactcccctcacctccccgggcatcagcagctgcctcccacggacagccgcaagccctcccggttccgcagcacagggcgggctggcacctgctccctctgatccccccactcaaaccctcttgctctgcctctcctcatccgatgcttctccgtatggtttaacactagccaggggtgaagggccacccaagggcttgcctgaccacccagcccgaactggcccccggtcctctgaacacgtccctgtccgtagcacccctggattccattgtgtgggcacatgccgctcctgaactaggtaatgctttgaaataaggaacccctttccatcatctttttcaatactggaaaccatggatgctctggggttttccaggatgcttcaggcgtagcagcagtccctcgggggctgggcccatggagagtgctcaaccttccttgttgaggggtctgagtcagccatggggctgcacatgtgcactgactggcttttctttatgagcggacgggctcaggcctcctctccagggacactaagtgtctccagcagttgcaccccccatgcccgctgctgcctgcagacaggacaagaagtctggacgcttctactcgtttacagaggcggagggcacggtggcagtcacacagggcaaggccgagggccgggcagctccctggagcctcccaagtgtgaagaaggcccaggagaaagtgtggggagaggagaggaggccgccagcgctgggtgaggaacggtaccgggggtcaagggaggctctggaagttcctcaggctgtgcgtggttggtggccacgggccctgttaaccttgttctcgggtttcagtccccacagtgaggccttgtcttcctctcgctgctgggagatccctgtgatccagagagggaacccacagaatcctcaccccacaaatccgcttaggatgggcagagagtgagggcagggctcctccgcagaaggtaccccgcaccccctcactgcttccagccttttgtccttctctccactgagaggctgctggtgtctctgcaggtcggaacgagctgattgcccgctacatcaagctccggacagggaagacccgcaccaggaagcaggtgggcctcaagagacgggtaggggtcccgggggtggtaccccagcaccagtctgctcccaaggtgggccaggccctcccaggaccagacgcaggcttttgaggggcggcagctctggatgagttatccctgttgggcgtgtcacaggtggtccagttttctttttctttcttttttctgagacggggtttcactcatgttgcccagactggagtacaatgacgtgatctcggctcaccgcaaccttctcctcctgggttcaagtgattctcctgcctcagcctaccgagtagctggggttatagtcacccgccacaatgcccggctaattttttgtatttttagtagagacggggtttcaccacattggccaggctggtctcgaattcctgacctcatgtaatccacccgccttggcctcccaaagtggtaggattataggcgtgagccaccacccccggccgggtggtccagttttcttggggtccctgctgccatcacttaggaggaaacccctcgcctctctggaaagtcatcagcccccatctcatccttctccaggacactaggacagacagtaaaacattggcactacttttcttttttgttgttgttgagacagagtcctgctctgttgcccaggctggagtgcagtggcgcaatctcaactcactgcaacctccgcttcccaggttcaagcgattctcctacctcagccttccgagtagctggaattacaggcatgcgccaccacacccagctaatttttgtatttttagtagaaatggagtttcactgtgttggccaggctggtctcgaactcctgacctcaagtgatccacctgccttggcctcccaaagtgttgggattacaggtgtgagccactgctccctgccggcactgcacttttgaaatactgccggtttctggattagctgggcaaggcaggactgagggcccaccagttgaccctttcattcattcattcatttggtccacagatgtgggttgagggctgtggagggcgagagtcaggaagccaggctggggaacacaggttgttgggaggtagagacaggagtcctctctccctgccacaggtctccagccacatccaggtgctggctcgtcgcaaagctcgcgagatccaggccaagctaaaggtaaggaaactgcagtgggggtgctggagtggccaggagtggtggccagcagcatatcttccctttggggtcagggcatcactgctggtgtgcaagtcagtgtgcttttctctctgttgaggagagccaggttgggcctgtaacctctctcccatccgcacaagagggccaagtgtgtggatgcctggctccccacaccctgggagctacaggccaggctcctgctgggatccccccttgctggctcctgcttagaggggctcacacggctcagagcagccggatcacccaccagccctcatttcttgagggcccctcagtgccctcgaccagagcatgcggagtggcaggggcatgggggggtgcctgctgtgggggtgggggtggcgtttatggtactgtgggagctggcaaattccttcctgcttcctgtcctgtgggactgggtgttccttcccttccctgggtcagccccgtcttgcagggcctctgctgataggtgatggctctggggggcctgatgttgctggcattcccctcggggtagccctgctccccacaggagtcaggcctctgggaccctggaaccaggggcctttgggtgaacactgggagggagtgagctctccatcagggaggtgatgacgacagaggctacacagcaagttggtgggaagatctgacatttgaggcattaagtctagaccatttataaacatttttatttatttatttttagagacaggatctgtctctgtcacccacgctcagtgcagtgacgcagtcatagctcactgcagcctcgacctcataagctccaatcacactcccacctcagcctcctgagtatctgggaccacaggcaagtgccactgcacggccatttttttctatttttttatagagatgaggtctccctattttgcctgagcgggtcataaacccctgggctcaagagatcttcctgccttggcctctcaaagtgctgaaattataggcatgagccactgggcctggcctgcaaacatttttttttttttttttttagcaatgtagccccttttcttttcttcccccaacaaaatatcaccctgatgtgttatcagaggagccgttctggtcaaagctaggttggcaaagctcctctcctcccgcgcatcctttcccaccccatggaacttgaactctaggggacctcagaatccagtttaaaagctactgggaggccaggcgcggtggctcacgcctgtaagcactttgggaggccgagttgggcggatcacttgaggtcaggagttcaagaccagcctggccaacatggtgaaaccctgtctctactaaaaatataaaaattagccaggtgtggtggcacacagctgtaatcccagctactcgggaggctgaggcaggagaatcacttgaacctgggaagtggaggttgcagtgagccaagatagtgccactgcacaccagtctgggcaacagagtgagactccatctcaaaaaaagccactgggctagctgggcatgcacgcctgtaatcccaggtacttggaggttgaggccaggagttggaggctgcggtgggctgtgattgcacctgtgactggccacttcagcctgggcaacattgtgagaccccatctctgaaaatattttttatattaaagaaaagccactgaattagatgaccttgaaagtcccttctggccctggcagttcatgatcctgacactggaatctcagaacgagtgggtgggaaccacagacctttctgcctcctaggaagccacaccccactgcccactcagttccattcctcctgccatcagcccagctgttccccaagccccacagctgtggcctggcacctcgctcctttttccctgggacagctgaccagccctcagctgttgctcccgcctctcagcctcagcttccacagccatggaacccagccctgctccctgtttcccctctttcgtctgcctctgactcaccgggaccctgcagatgaccacggtgaacagacttcccactactgggtttagggcaatcccttgggggccggctgtgtggcccacatttgcttcagggaattgtacttgtccttgtccacaggttctgacctggggcccaaggacagccttcagtggatggctggacagacaccaaggggagccataaactccttaaaatatgcaaattttcatgtatatgtgagttgccttggagagattgctgtgaggattttgtcatattctcaaaggatctagaacccaaagtgattaagctctgggttggacagtgatccaatagaaatccctgagtgagaggctgggtcctaggcctggctctgccccgtggccgtgagtgcttgggcagagtcactgggacctcctggagctccagtttcctcatctgtaaagtgacaggcgagcaaggtgacatccaagttcccctcccggccccggttagtggctccctggctccattgcccggctactgctgtcactccccatcgggtccttcccacttcctctgacccctgccccaccctgcccaggccgcggtttcctgagccccagccgtttgtttagatcgagtatccaggaaggcaggcactgagtagatgcagccccggcctcgtgatggagttgttaagtgccgaggtcttcgggctcgcaagggtgcgcctgccaagtccctcatgccctcctgcggggagaggtcaggggctggcctgggcactttcctcctgaaaattccaagtgtcctgggaggagacacacacttagacttactagttagctccctctttggttatcagagacagcctctgagagcaaagcccaagtttggccccaaaaggacagtggggagggggccaaggggggccagggacaaacctcatctatttcactgctttgtccacatcgacaatgacccactactcggaacagttccctactccccaccgccctctatggtgcgtctcccccgaccccttggtttgcatggccccccgtgtgccagtctggtccaagctcacctggtcaccatcaccactctcagcaccctagtcacccaaattctcagagcctcagtttcttcatcttaatgatcctacaagtcctgtcagtctcacaggactcagtgaggttgtgttcttgaaaaccttccgtgggctgcctcatgccacatgggtgaaatggtcaccttgagaggatgagtggaagggcctgctgtgttctggcttcacacctgcacggcaccaggatggcgggggagcactgagcctctctgagcctccctgagcctccaggccgcggtgctgcccacctcatggagctgcgtgtggaccgcgtggaggcatccctcggaagagctggcgagctgcagggctcaccgttgcttctcaacttctgtttttagtttgtgttttagagactccactctgtcacccaggctggagtgcagtagtgctgtcacagctcactgcagcctcgacctcctgggctgaggccatcctcctgcctcagcctcccaagtagttgggaggttctcaacctttgtatcacttaagggagatccaggtctaccaagttaattattattagttattcaataatggttttatctttgtcattaaaaaaaaattcatgggtgggggcggtggctcatgcctataatccagcactgggaggtcgaggcaggaggatcacatgaagccaggcgtttgaggccagcctgggctaatgagatgctgtctgaaaaaataataatcatcataaagatatttatttatttatttagacagattcttgctccgttgcccaggctggagtgtagtggtgcaatctcagctcactgcagcccctgcttcccaggtttaagcaatcctcccacctcagctccttgagtagcttggcctgcaggcacacaccaccacacctggctaatttttgtattttttgtagagccagggtttcaccaagttgcccaggctggcctagaactcctgggctcaagcgatctaccaacctcagcctctccaggagctgggattacaggcatgaaccaccacttccggccaggtatcaaatttctaatcagagcccctgagttgactcagtcgagccatttagccccgataaagctgcagacagtgaataatacttgctgttccagcccgtgtgtgtgtggtcttattttggataatccctgctgggtacagtaacgcatgcccgtggtcccagctactcaggaggctgagatgggtggatcatttgagcccaggagtttgaggctgtagtgagccatgattgtgcagtactctagcctgtgcgacagagtgagaccctgtctctggaaaaaaaaaaaaaaagaagaagaaaaagacacagtttccattaggcttcttgaaatagggaatgttgtgtcattggttttgaagacctttggaattcgggcactcaggatggaaaccactggcttatatgaatataacaaacgattactattgttacccgtgccatccaagtggctttccctgtgtgcttatttgttccgggcctattcagggtgaacccatcctctggggtcttggaacctttggagggcagacagtgggtatttacactctgacacatgaaagatgggtgagtcccaggtgcctacagtgcccagggagatccttagggcaggactgaggcaggaggggccacaggaggtggtctcttgcctccagacagcccgtgtggccagggatgatgcttcctgtgcactcgaggagggatccagcagatattcatgcatcgttttcacaagacaggtgctgagctaggcacctgtggtagagaggtgagcaaggcatagaaggtggccccgtaattaataaaatgacagataatgtctctgtaagctctgatgaaagaagcagggcaagtatcatgcccctttgacagatgagaaaactgaccagagaaaccagctgactttctcagttgcaaaacaagttaatagcacggcacagacttaacgcctggtcccccagctctggccactggcagcgagacagcttccctgacccgagggccggacctgcctggcctcagcctgactagtgaccctgctgaggtcctcccttgcaatgtctcccccaggaccaggcagctaaggacaaggccctgcagagcatggctgccatgtcgtctgcacagatcatctccgccacggccttccacagtagcatggccctcgcccggggccccggccgcccagcagtctcaggggtaagtgggctgccgagagctggaggccaggccagccctctcctcctccctcctccctgttcagaagagccagaagcattggccagcccagatttctctcacctgagtcctcttggccagggcagtcagggaaggagggaacaaggacccaagggccacacacatcccggcttggctggtattgggacggctttcttggggtcctcggcaatgactccacagacttcacaagggggaagggggagcttccaggagctgaccacctggtagctctgccatgttggcctaatttacagatgaggaagctgaagccaagggggctgagcggaagcctgagaccagcatgtacctgggcagctcgtgccacgcagcctcattcctgccctcctgccaggtggagagctggtgccccaaaaacaaacccctggtcagattttaactttcccagccatgaccatgttggccacactctcagaatgatccagaaaggccccttttcagagctgtctcctcacaggggctttcttggctccagggactaaatgagtcttcaaggcacctgcagcaccgccctaggcacgtggggaaggggcagtgccaggccacagcatttttcaaagtgcgtcccagagagcactagtccatctgcatgttaaacagataggacacagtggttctgtgagtaagtttgggacccttggcattaagtgggttcttggcactgggacttttctgagccttaggtctgcactgtgactctgcaggagttgccctgtgctgtgtggaccacacctgggtgcttttcccatggagcccctcctccacagggcctgagagccccctgaaactcactctgggggtgctgctgtggcctgttagcattcactagctaggcgaggcctcgggctccagcctctcctcccagtggaggccctgcccggtcctacccccacccccacaccacagggccccgggtgcacctggggccgtgctgattccatgccttttgcctcctcagttttggcaaggagctttgccaggccaagccggaacgtcccatgagtgagtatggcctctggtttctcttgccagttgctccctgaactgaacttgaacccataaactcatggcattaagcctgggccccagggtgtgctggggccgctgctggggtcggcctttcaggatggctctgagctcagggattgggctcttctactgtcagccatcactgggctcatctgtgatgtctacaccctagggtggtatttgccaaaactccagtctgtccagggtataggcagggccagagctggggtcccccaggggaggaggctgggaagcagacctctggctggcctgggaggaggagagggaggggtggatttcttcagcagacacgctgtgtctgtggacccgccacgaaacccaggggagtcggcaggggcgggagtaggaggccaaggcccatcgggaccactgaaatccagaccaccaggacctaccacacagaccactggacccagtgcagggatccggggcggtggcctgcccgaggctgacacctcccctcctctctctcccgcagtgtgaagcctttctctcagcaaacctatgctgtccagcctccgctgcctctgccaggtgggtgggcgctgcgtggccccctttctatcgcagccatgtggctcctgcctctgggtccaggcccccggcagccgaacgcctgcgtgtccctgttagatgctgccccgtcatgcacactgaccacacgtcctagtccctggccacaccccattcctttcccccagcatgcacacctcagccgtgtgccaagccccttcatgcccctcgggttgccttgctcctgtcccctcaaagctgtgctcagggcttgtggggcacgtgcagttccaagggcagtgcccgtgccctggcggctgccccacttggccggccttgttactgcagtgtgcctcacacacctggtcctgggagggccgaggggtgtctagctcaccagcctggagcccctcccgagaagagggacccttgtgggagaagacctggtggaggcagccagcggtgctgacaggagcccccaccccgccctctcactgacaggctctgctctgtcctcgtctctttctcaggaggggccctcaccacctcccactctgtaggacaagaccagctcctcactcttaaactgccctttctggtgtggagtctgcctgcccggccccttggctttccctgccaccaagagcagccctgctgccttctgtcccccaggtcctgaaggctgctttctctcgttcacacatcaaaacaaagtcacagcgtcaggtcccgtccaccctctgtctcatgccagtcttctgtccacactgaccatgtcttcactccaggcctgctggcttttgcctgcgttcctgcagcagcctctccaccggctcgctgtcccgtctcacctcctctcgtcaccctgtcactcaccagagcttcagtctcacggtgttgcttccaggtttatggtgccttcctggccccctggtgccttcaggacacgatctaaactacagtaggactggagtaggttcatctgttagcaacgctggattgaggggctcttctgggccaggccctgttctgggagcgggggagacacatgtgatgcaaacaggaaacgtccccgtctctccgggatgatgccatattgtaatagtggattcatctggttatttccccgactggaacagaagttgcttgagggcaggaacttaacagtgcctgttctggaagcctctcggtcctgcagggccccagctgccctccagaatccagtcttgctcggcggttccatgcagagtgctgagtggcccgagttgtaccaggcgagcccctccccaccagggcagctccaggatgccctggcccaagcctggcactccctccaccacctctgctaggaggtccatttagggagacaggcggtccccccaggcagcacgggtctgtccgaggaggcctggggtccttgcagagggtgcgggcagggcgggtgtccgtgaccaggttccatgtgcctttctcactttgtgcagggtttgagtctcctgcagggcccgccccatcgccctctgcgcccccggcacccccatggcagggccgcagcgtggccagctccaagctctggatgttggagttctctgccttcctggagcagcagcaggacccggacacggtaggtcctggcctctgcctgtccagctccctggtcaccccctctccctctgtttctgcttccggcagtcttgccccactccatgctggggcttaattcaagttccctgttcctttccgatcttcccttctgcccttccccccactcctcctttcctccttcacgtcacccctcttccctctttccctcctccctggcttcctttccgtgtcccagcgcccagtcagcgtcacgctcctccctccctgtcctgtgttcctcctcccctcctaacccaaccgacccttagtccaaggttgctctggtcccagccccacccctacactgtcccagcctctctctggttctgagaagcgggcaggaagctgaggagtctcctgtgtctgctccatatcctatgggataccagcctgtccccttcggtgtccagtgtcctgggtgaccagcgtcacctgcaaaggtcagagggggacctggaggaggccaaggtgacaggatgccagggcccttctcactctgacatcttcaaacttctttttttttttttttttcttgagacagagcctcactctgtcacccaggctgggagtgcagtggcatgatctcagcttactgcaacttccacttcctgagttcaagcgactctcccgccttagcctccggagtagctgggattacaggtgcctgccaccacacctggctaatttttgtatttttagtagagactgggtttcaccatgttgtccaggctggtcttgaactcctgacctcaagtgatccacccacttcggcctcccaaagtgctgggattaccggtgtgagccgccgcacccggctcagacttctttttagctgaggaacccatgaaccaaatagacctttacttagaagtccaggatgtaaaacaaaaggagtagacttttaccatctctattttactcatggggaaactatggcccagaaaggccaagcggcttgcaccaggtcacgtggtgggcacgcagagccagggttgtctgtctgaccgtctggcctgtgctccgtctccctcagacccactctctccacagtacaacaagcacctgttcgtgcacattggccagtccagcccaagctacagcgacccctacctcgaagccgtggacatccgccaaatctatgacaaattcccggagaaaaagggtggactcaaggatctcttcgaacggggaccctccaatgccttttttcttgtgaagttctgggtaagcctgtgataaccccttctttcctgccaccagcgtgtccgtggtagtgagaacggggcgagagtgcccagagtgtgcccttgtcacagtagaaacttggggaggtggcaccagtgagaaggggagagtaagcccagcatggctatgggatggttggagctgagccgaggagcggggcggtgatcccagagagctggcctagtcgaacgaggccttgtctcacgggtggggatggcagctaagccgggctaacagtggagccctcaggaggtgaggaggtgtagttccagaaaaagacaaacgggaccctgcggggataagtgaagacatgactaggagcgcccttgtcacccaggtctttgaatgacaagtcctgcatgggtttccgggcctggagctggtccttcggtgctcgcgtccaaggcatgttgggctgaacagagcttggagaaggggagggaagtgttggatgggtcacccagctgactctgccccagggcgaggccaccccacaagaaacacccacccagcttctcagatagctcagcctgtagacttggcctctgctgccctcccacctcaccccgggcaggtattttgtgggtggaacctcctccattgaaacgtcttgtctgaggccgggaggtacagtagctgctctgggagcttagcttcctgggggcccagtgtgtgcagaaaaggggtgcgaggagagagtcagacaagtaagtgctaatgaagccagcggtgaggaagggcaggaaatcaggctctgtgactgaggcctccagtattctcaggacacggactgaggcttgggtggctctgcccgcatccctcttccccactccccttcagctctcctcacgctcttttcaatgcctcttgtgcagagattcttaccctttatttactgccagaccactttcataatctcaaagctttacttttcctagaaagaggcatattcacaccgaagtttatatagacgttcagatggcttgccggctcccggtgagcagctcccagcctggctctcatccacagctgaacatgggggcaggctgtctccagaaggggcaagtgttggaactgagacctagggcccctgacctttaagacacttagcatttgcgctctgccagcggaatggaagttggaccctggcctgagggatgggcacatctattggcagagatgggaaaggctgttgcggcctgggagtgcatgagtagtaaaggcagaaggaagtgggctctggagtgaagttgaagccgtaggtaaagagggaataagaggagacaactgggagagtgagttaggttctggaaggtcttgatcatactaaagtttgagttttaacctgttctggaatgaaaaataagtagtattttattttacttggtcttctttttaaatcaatgcatgttcatggttaaaatgttaattaataccaggagccttatttaacgaaagagaatgaagggccagttgcggtggctcatgcctgtaatcccagcactttgggaggctgaggcgggcagatcacaaggccaggagttcaagaacagcttgactaacatggtgaaaccctatctctacttaaaaaaaaaaaaaaaaattagacaggcgtggtggcacacgcctgtaatcccagctactcaagaggctgaggcaggagtaatcgcttgaacgtgggaggcggaggttgcagtgagcagagatggcggccactgcattccagcctgggcaacagagcgagactgtctcaaaaaaaaaaaaaaaagtgaaaagcatcatattcttgtcctactcctccccacacccaaatcccaatccccaaaggtagtcactgcaaatttcagctgtttattttgggctttatctctttagttctaagtaatatgcttatattgctgtatctcgatgtcaggattaagacattatattttcatttcattatggtagaaaaaattagctgtgttacatcacttttccccctcatcatcccaatgtaataatatccaataagttatttaatttagtaaaagtcataaaatgttcactttttttttttgagtctcgctctgccacccaggctagaggtgcagtggcgtgatcttggctcactgcaagctccgcctcccgggttcacgccattctcctgcctcagcctcccgagtagctgggactacaggcacccgccaccacgcctggctaattttttgtatttttttagtagagacggggtttcaccgtgttagccaggatggtctcgatctcctgacctcgtgatctgcccgcctcagcctcccaaagtaatgttcacattttttgacaatgtagattgaacaccaaagagccaagaacgggctgggtgtggtggttcatccctgtgatcccagcactttgggagcccaacgtgggcagattacttgagttcaagaccagcctgggcaacatgatgaaaccccatctatacaaaaagtagctgggtgtggtggtgtgtgcctgtggtctcagctactcaggaggctgaagtaggaggattgcttgagcctgggaggcagaggttgcagtgagccaaaatcgcaccattgcattccagccgggtgacagagcaagaccctgcctcaaaacaaaaaaacaaaaaacaaaacaaaagtacaaagagtcaagaagggtattatgattacatttttacctcttgtacaacttttttttcctgcaaataaatggctcttgcatattttttaataagcctattcttaaaattttacaaattgctccatcagaaccaccatataaaattaaaatttttttcccccaaatattcaaaactgttagataatttatcaatttctcctttcttctggagatctttctcctggctgcctctgttctgctccagtttgaacgtgttattctttttttttttttttgagacagagtcttactctgtcgcccaggctagagtgtagtggcgcgatctcggctcactacaacctgtacctccctggttcaagcaattcccctgcctcagcctcccgagtagctgggattacaggcacccaccatcatggctggctaatttttgtctttttgtagagacaaggtttcaccgtgttggccagcctggtcttgaactcctgacctcaggcgatctgcccacctcagcctcccagtgctgggattacaggtgtgagccactgcgcccggcctgagcatgttattctctaggcttgccctacagttgtcatcctgagcctcccctatattgatacaatttcctagctcttgcatttctctctttattggtataaccccttcattttgtgggaacacatcctctagtaccttctaagaaaagatgcatggtacataaatgaccttgcttctttgaaatgtcattatttttattatatccttatacttgactgattggtattggtagtctggataaagaatctagatcatacatcattttccctagaaaatgatgacttttttttttttgagacagggtcttgtttcgagatggagtttcgctctgttgcctaggctggagtgcagtggcgcaatcttggcttattgcaacctccacctcccaggttcaagcaattctcatgcctcacccttgcaggtagctgggattacagtcgtgtgccaccaggcctggctaatttttgtatttttaagagagatgggatttttcagtgttggccaggctggtcttgaactcctggtctcaagtgatcctcctgcctcggccttccaaattgctgggattacaggtatgagctatcgtgcctggcctagaaatgattttcgaggatcattctttagtgcatttgtcattatcttctgacataaatagtctgatagcattctaattccctatcctttattatgtaacttttttttttcctctggaagttgtaatgtttcttctttctccctaatggccagtttcacattggtgagctttgggatatgtgttgttttacttccccgtcttgagccaggtacttggtaggcacttttaactgtgagatgagtctttcagttttaggaaatgtactcgtattatttctttgataatttatttccctctgttttctgttttcttttccaggaatctctgttatgatgttggaaccctctatgatgtttaccatttctttattttcttggacttatcctctacgatttttaccatttattttcaatcttggtctgttttcttagcgatttccttaattttgtattctgactcttttctgaattagttaaggttgtgtccaagtgcatatcacacaaaccccaaagaaacagtggcataaatagtttttctttcacatcaaggaagtctggaggtaaagactgtccagtgctggcccagtgctcctgacatcatgagggacctggcttctctctatctgctgtcctcagtgtatgacttctgtactcagggtcatgactgctggagttccagccactgtagccatcttccaaccatcaaaagaagccagtttagctccctgtaaggggcctgctgggaagccccataattagttgtgtggctgcatcttgccgtaaggaacccgggaaaggtacttttttagttgggtaagttgctgttctgaataaaatcagagctgtaatactgtagaagaagctgcatacatccttttatggatgtatcttagttcagttgatgacattttgttttttctgggtagtttataaagtgtgcatcctacagttaagggtgaattagatgagtggaatacagcagcatctctgccacaccttctgttgaatatttaatttcggctctgacattttaattttccagagctccttcttgttctgtgattgcatcaagatgtttgatggatgtagtttttctcctctttttcttaaaggtatgaagtaagtgttacttcttaagttttctcctgctcctaaccctcccccaacccacgcccagactaagttttgctgtgttgcccaggttggagtgcagtggtgtgatctcggctcactgcaacctccgcctccctattcaagcaattctcctgcctcagcctcccaagtagctgggattacaggtgcccgctaccacgcttggctaatttttgtatttttagtagagagaggggtttcgctatgttggccaggctggtctcgaactcctgacctcaagtgatagatttacaggcgtgagccaccacacccagcctcctgctcctttctttgtctttgtttctttttaattccgtttttctgtttgttttggtccttgtctttccagctggagggttttctttggtgtctttagttcttagctgcctgtctgtatttttttaacagctttcttgcaatgtaattaacttaccttacagttcacctacttaaaacatacaggccacgcacagtggctcacatcttaatcccagcagtttgggaggccgaagcagacagattgcttgagctcaggagtttgagaccagcctgggcacatgacaaaaacctgtctccacaaaaataatacaaaaattagtcaggcgtgatggcatgtgccagtaacccctacactttgggaggacgaggcgggtggattgcttgagtccatgagttggggaccagcttggccaacatggcaaaaccccatctctcctaaaaataccaaaattagccaggcatggtggtgcgtgcctgtaatccaagctactcaggtggctgagatgggaagatcgcttgagcctgggaggcagaggttgtagtaagctgagatcacaccactgcactgcagcctgggtgacagagcaagatcccatctcaaaaaataaagtatacaattccgagtttttaagtatattcacaaagttgtgcaaccatcaccacaatcaattttagaacattttcatcatcccgaaaataagccctgttccctttagctgtcactccccactcctaccccccagccctgtgcaataatctactttctgtctttgaagctttgcctattctggacattttgtataaaagggtttgtggaggatgtggtcttttgtgactggcttcttgaacttggcatagtgttttcaaggttcaaccatgttgtagcacgtacgttcctttttatggccaaatgtacggagagtccacattgtttatccattcatcagttcatgggcatttgggttgtctcctcttggctgttaggagtagtgctactgtgaacattacgtaccagtgtttgtgtggacgttcattttcatttccatatgcttatgtctggaattactgggtcatatggcaactctctttcactttctgaggcactcccaagagtcttccgaagtggctgcaccgttttctgttcccacctgcagggtatgagggtatgaggatcctattttctccacatcctcaccaacacttgatattctctgattgtagccatcctagcaaatgtgaagtggtatctcattgtggtttttatctgcatttccctgatgactgatgatggtaagcatcttttcatgtgcttactggccattcgtatatcttctttgtagaaatgccaattcagaaatttaggtccattgcccttttttttttgagacagtctttctctgtcacctaggctggagtacagcggcgtaattttggctcactgcaacctctgcctcccaggttcaactgattctcgtacctcagccttctgagtagctggaattacaggcacgcaccaccatgcccagctcatttttgtatttttggtaaaggcggggttttaccatgttgtccaggctggtcttgaactcctgagctcaagcgattcgcctgcctcaacctcccaaagtgctgggattacacgtgtgagccgctgtccccaaccccattgcccatttttataataaattgggttattttttattattgaattatgagttcttagttctggatgaaagttccttatcagttatatgatttgtaattattatttcccattctgttgaatgtcttttcacattcttttttctttttttcttcagagacagggtcttgctgtgtcttccaggctggagtgcactggcatgattattgctcactgcaaccttgaacttgggctcaagtgatcctcccgcctcaacttcttgagtagctgggactagaggcatgcactactacgcctggccaattttttttttttttttttttttgagatgaagtctcactctgtcacccaggccggagtgcagtggcatgatctcggctcactgcaagctccgcctcccgggttcacgccattcttgtgcctcagcctcccaggtagctgggacttcaggcgcccgccaccacgcccagctaatttttttgtatttttagtagagacggggtttcactgtgttagccaggatggtctcgatctcctgacctcgtgatccaccagcctcggcctcccaaagtgctgggattacaggcgtgagccaccgcgcccggcccaagtttttatttttatttaaattttttatagagggtgtcactatgttgcccaggctggtcttgaactcctggcctcaagtgatcctcctgcctcagccttccaaagtgctgggattacaggtgtgagccactgtgcctggccccttttcacattcctagtagtgtcctttgatgcacaaacgtttctagtgttgatgatgtccagtttatcaagttttccttttgttatttgttctggttatatttagtagtgactgggagctcttcgtgcaaggtaggacttgtcacctggtgggtttcgctttagggtgattgggcttggggagctagctgttttattggggaaatcaataaatatgtgtgtttactggacttttttttccccctgaggtgatttagtttctccagagacgattcatctaatttccctggaagggacatacttggtcacaagtgttctggtagtgggataaagggtcgggggtaggggccctgaccatttctgatgctggctttcacttaactctcctgttcttactccccctcttccctctcttttgaataagccctgtgtccctgagacctgttgccctcctgtttaatttctgaagatggtcaccctttggtcctctttaaaaagtttttttgtttgttggtgtgttttttaatttttaatttcatagagacagggtcttgctatgttgcccagactggttttaaactcctgggcttaagccattctcctgcctcagcctcccaaagtaatgggattacgggcaggagccaccatacccggctgaccctttgatcttctaccgatgcatgggaggggtgggcctgggggctggactgtccagtgtacagactttttgtcagttcctggggacaaatcctgttccctccagctccgagccacgcagctcagcttcttatctgtcacccctgaagatattggtaggttgtgactctttttgctttctctaccccgtggaatccagtgtggtcctaatcagctttgagtctccaaagcttgcccagctctcttgtcagctggtctctttgttttctttatctttgtggtgctgcatattgtttaaagttacttgctgttgtccttctagctgggtctctggaaggggaaaaaataaactggggtagtcagtctcccacctttagccaggtgtccaggatgatggggtgacctgtgtgccacttcgaaggggtcggcagtcgctgtttggagtgctgggctgagaaggctctagcagggaggagtgctgggtggacggtcatggccacgtgcgtagccagggaaatatttgttagcccttctccttaagcgatgaggagtcatttaaggttttcgaacagggcaggacgtggccagggttgtgcttagttggttaactctggcacccagactggaagcaggtgtgagactcctgcagtggagaccaggcaagacgcatgtgcctcctgaggacctcggccgagaggctggcttcagggtgtggcgtgggaggcaggatgctgtccactttttctcaggaggggcttaaatcatctcccagtctcccgtccagccccggttgtgggaattggaacctgtacagctggcagtggcgcttcccaaccctgctgtgagtctgagggggcccccagccccctggagaagccttcacccttgcttgagcactcaccgcccccggcctgtccaggctcagccctgactcagcggaaggagcttaggcgagctgatctgtggctctttcccggcatggctcaggaccctggggatacagttggggtcagagcggagacccagttggcagtggcaggaagcactcatgggaacactgccttggagcgggaggtggcatgtccgggaccctcttgcactagctcctgcctttagctattggtgatattctgtgttcttctagccaccctccagataaggaccatcctaggtctcttgtttcacaagtaggggaaactgaggcatggagtaagcagggcctggccctgagtcccccagccagggtgacctctgtcctgtgggcactcctgttggatacatgctgtgagatagatgggcccagatagactgagagagatgacagctgcactcttctcaccacgttacatacagtcacacgtctcatcctcaccacagccaagactggataacctcatctgcagaggggaaactgaggtacagacaggtagaatcacctgccaaaggttgcccagttcatagtaccagacccataccagaccacgggtccatacctgagcagcctgaccccagggtgtgtgcttggagccaccatactaaacagtcctccttgcgaagtcactggctgccctccatgcagcatcctggagcttctcctgctcccactggagaaggctctgaattgtctaaaacagatccccagccccctgaggaacagcaggcagtggcagcgtggggagagcagacttagctctgtgcagtcaatgtagagccagccccttgggcttcttgggcgttctcgacctcagatatcccttccagaaaatagggcagtggccctgcgtggagactaaggttgccaggaaggaaggaggacctagaaggtacttttccaaacttggtagtggcctgtgtcctctctttctttctgactcttaggggagtttggaggtgggggttgatgggagaagagagggttgggacagctggtgccaaagacatgggattcagcaggttcccttgtggaccgtgtgctccagccgtgtgctgtacggacccagcgcggccctcggcttccaggagctcgcactctggatgggaggatccagcgcgagtctcggggtcctgggacaggagccgctggacagggggctgtggtgtgccccccagcaaggcccttctgatgtgtcatggcagggcacggtgggcagcagttggccccagctggggcagagtctcagttctaccacttgagaactgtgtcctgggcaaatattggcttctctgtgcctctgcttctttgtgtgaatagtcagcagtttgatcttggggacctgccaggggctgtgtcgctgaagaccccgtgtatgtggccggctggtactgagtggggggctgtggcctgcccttgccccaccccttgcctgagccctctgagtgccagcggcctgggcaggtgaaatcagagatgagggagcgccggaggccagggcaccttggcggtcatctgctccctcctccgcatgtgtggggcgggcagaggcaccagaggaagacacatatgtgacggggaaaggtacatattcgtgtttgctgacaatgagactttgcgtcaatcgtgggtcctcacaggctgccccggctccccccgcatcgggaagctcctgtcttctgctccctggcctggtcccgccttccccctccatcagctggtgtgaacttggccacacacagttaggaaggaaaactgctcaggcaaggaaacggtgtcgcctctcccggagcctttcttttcctgcctggctgttttctcagtcctggctcccaggccctgaatgtgtgtgctggagaggcaatcagaacccccttggagtgggaggaggacttgtccgtctccagtccagcctccctgcctgtcccctgagttactgctcttactgagggcgctgtggtggtcattcatagactctcggactgctgggacacatttccagctagaagtggcatctgccagcctgaagggctgaggctgctagggctgtgcacagcctcagccctatctgctgagcgccacggggcctggagcgagggactgatgcgatgaagctcccttcctcccccagagccccgcaagtccagcagaggccacctgtctctggggccggtgagagggggcctttggtggccattaacgccgctctgcacattggaaatgccaggcagagccgggctgcaccgtggaggcagcagagtaccccaggccttcctcccatctcagcctgctcttccctttcagtccctgacatttctcccaggcacataccagcacatgacaatgaatctgagcccctccaggcccccacacccgggctgcggctgtctctgctcatctgtcagtcacccgatcccccacacctgttccaggcacagctgcccacccgcacgcacagctatgaatagggcggagggagggttgcaagggggcactcacagggcaggggaccggggcagctctcattttttcttaggccaagaagcgtagcttgttttgggtggttgctcagtgtggggggatatgagggtggacaggaaatgtcaggaaggagtatagctgcaggagaaggggtgaggctgtaattagaaggatccaggcactgaggacgagtcgaggtgctctggggcggttcgtccgtgtcgccggctggtgtgttccgggtttatgcagtgtgaacatgagttctggggctgattgtgggatctctctttctccccctgacccattgctcaaccctagcacttgcattctatttgttctcccgattataaattccctgagagcagaaacaatgtctcaacctctctgggcccccctgcctctagcactgctggcctgggctggacaaatgggcacctgagcgatgggaagagccagggagtgggagctgatgacagaagagtgtatctgagatgggggtggagctggggcgcagaactctcagggtgagcaggacagggtaggttcctgcttgcgcctgagggaccttgctcttcccactggtgccacccggaggtgagagggtgaacagccgcctgcaaccttgattgaaggcccaccctactaaggccctgggagagcttagttcttgcctccagggagcatcgtatctggaagggggcaaggacatctggacagattatgacaagcagggtaatagagggggatctgccaattgctcctgggggctgggggcagccgctgcctctgtgtgtctggaagagctgggaggtgtggatgccagtccttcccagcttggcacactggattcttctaagatggcacgtgaatatgcatttttttaaatagttaagtagttgcccaggctcagtggctcattcttgtaatccccccactttgggaagctgaggcaggaggatcacttgagcccaggagttcgagaccagcctgggcaacatggcgaagccctatccctgtgttttaaaataactttatttgaaaatatggaaaatagttataggccagacgcggtggctcacgcctataatcccaacactttgggaggccgaggcaggtggatcacttgaggccaggagttcgtgaccagcctggccgatatggtgaaaccccacctctactaaaaaaaaaaaatacaaaaactagccgagcgtggtggtgggcacctgtaatctcagctactcaggaggctgaggcagaagaatcacttgaacccggcaggcgaaggttgcagtgagctgagattgcaccaccacactccagcccaggcgacagagcgagattccgtctcaaaaaataaaattaaaaaaatagttatatagttattttcatatatattagaaagaatagaatccttgatttcatggatttattgcttagaatggaattaaggaataaaagtgagttgatttcaaagaatcaggatgtgtcgtagatggcacatgaatgtggcattgatcagagggaccatgcgcggttaaaatctgagggtcaccaccattgatgcctggcctcacctcttggtgttccccaccatgtccagtgcatccttcccaggcagctgggcttcctgccagcggcatttcaggcattgttcacatttttgccctgtgcttccagctacagaatatgtcctgagcacacaaactgtcccccaggccctttttaggaacagtctgacaaagtcagtctcctaggaggagcaggtgacttcgagaaaataggagacaggccaggtgcagtggttcacacctgcaatcccaacactttgggaggccaaggtgagaggatcacttgaggtcaagagtttgagaccagcctaggaaacagcgagaccctgcctctacaaaaaatttaaaaattagccaggtgtggtggcacatgcctataatcctggctactcaggaggctgaggtgggaagactgcttgaatccaggagttcgaggctgcagtgagccgtgatcataccactgtactccagcctgagtgacagaacaagattctgtctttaacaaaaaaaaaaaaaaagaagaagaagaagaaaacaggagcccgaaagcctgggttctggtcccattcaccttatatttgcctgtaagaccttcggccagtcacagccacagttaaatctagtccggcagaggcctcagccacctctgccatgccatcctgggcaccctgcctacaatgtgtcatcccctccctcccagcatcacagatggagacagagtggggagactgaggccagctcaggggtggtagtggagggtgtttaggataaatgctgctgtctgtttcagaggctgagcattgacacgaatgctttttttccctaaaggcctcatcaaagccgaggcaggtgcactgaaccatatgccattctgtttcagcatgaaaacagcctttttttcctcatcataaacgtaatccaccctcattctgctccgtagcctgctttcccactcagtgtgtttgtagtcatccatgataataaatgcaggtccttctcagcgtttttttgtggctacataatgtttctattgtgctatagacaatcaacacccaccgccagtctagagaaaggtcctgctctgggaaaacttctccaaaggagagaaaaataacgattgagtgtcccctcatggccagtagtagaattgcttggtgcctggctctgaatctgaccaaaaccttcctggggttctagggatccccttatctttgcacagaagagtccttggtgtcagaaccttgaccaaggcctgacgctttactgcattcgtagggctgcgctctgggcacagcttgcagtgatttcagaccggggtgtgggtgggaggagcggcctcccctgagaataagcctttgtaatgtgcctgtgcgttgtttctgagtcttgacttgttctcttagcacccctggctcagatggggtgatttgatgtggggctggagttctgggcatggggacccctaaggcgtagggcttcaggaatacaattcctgcctcagagtccccaaagcaccaaattgtctcatctggtgccttcctttcttcgctgtggcactctgctggtttgggacaagtattggggttggaggctgaagacctggggtctttcacttactagttggatggtgttgggcaaggctaacagtcaggacccctcatggataaaaccgaggccgtggttttgggtgtgagatcagcacagagtcttactccgccttttctagaagggaagtttcagatcagccccacatccagcaggaggccccctgggctctgttttcatcaggggaaggaagagcagcctgtctgaggcaaggtgagaagctgacctagaggaccagtgtctgggcctgtgaagggccttgtgagccaggccggggaccaagactcctgtcccttgtggctaaatggctcaatgagacggtgaagtgacttgacttctgaagagattcccggggcagttaagagaatgaaccaaagggagggacagctggtgctggggagattgctctggaggctgaagcagagatgtcaaaagatccaaggtgacgggacccagcagtgcctagagggggaagaggccagccccagagccgtttctgagggagcatcgatcaggtctctggcgagacaagaggatgagacaggagcagcattcaccccttccaccctccccactgccggtctcttgccctggttttctgttctcatgcttcctgcactatcaaaattgactctggaataattctgatagacgcattcaaactaaaatagagctgactggtagagattcaaacctttgcagtttaacaagaacaaagtcttagactatgaaacttgaaatcttaaagatggaatctggggctcccacctgctgggtgtgttaatatctgggcaggcagcagtggcctgaaactgtgtgggtcccagtgtcctcttttcccatgatttaggcaacacgacctgattttgtaccaggcagagatgtagaggaatgtggaagctttctggcgtcctactgtctaccctcagtctgatttcttcccagccctagagccgggaccgggaccctgaggtctccttgatgctcccgtctgacatggcacctgctgacactccctcgccttcccactgtctccctccaggcagacctcaacaccaacatcgaggatgaaggcagctccttctatggggtctccagccagtatgagagccccgagaacatgatcatcacctgctccacgaaggtctgctctttcggcaagcaggtggtggagaaagttgaggtaggaggccaccctggcgggtgagggccggtggcagtggtctgtgtttgctgggcatggcttccatttgctttcaggaggaatgccctccgttagggagccaggataatcccttgttgccttccctgtctgctgtcagtgctgtgtgcctcccacactccccttggcaccagtgtcctgcccagctaaccagagccattgctgccctttcaggatcttccaagcacgtccttgcaggcacccccggtcctctccaagagcagagccgcagcacaggcagagccctgggcatctacctagtccagccctctggcttcacagtggaggcccagagagagcggaggcctcccaccaatcgcccgcacatggtcacacagctcattagtgcagaagcagggctaagatctctgtcccctgctcactttgaactccatgaatgcctaaaactgttccttccctgattttctgcttatgggtaccctggagaccctgctctaatggaagttacagaaaattcaggcctgccttttatggtttctcccactctgctaaacccccggccaagggcagtgcagggcagtggtgaggagcataagcgcaggtgaatccccacccaggcaccctgctttccggtgcgtgtctggggggttgtgataaaatcctctgtattttggccctaaacaagggccaagttatcttcactgtccgtgacacggtctcctgcagcaccctgtgttctgggcccgctgcgtagtggcagtgacaaggagctgggactgaaggcctccaacccaaagcacctgtggactctgagagtccggggccctgtgccgcccacacacttgttaaacctcctcaccgtgcaggccagtcttcgtccctctcctcaccccttccccagattggtctgaattaatgaagtcctactctcacagtctgtcagttattgatagccttcctcatgccaaatgcagccagatgcccggccagcaccagggaggagacattactccacacagtgcttctccgcctggctgcaccttgcagtctcctgggagctttggaaacacaccagtgcctgaaacccattcatcacccctcagtctctagggtagagtccaggcattagtggtttttaaaaagttcctcaaattatttatttctaattaaacttgtaaaacttttgagataatggtggatccacttgggctcataatcccatgtgcgctttacccagctcttgccctggccatatcttgcataactagagtgtaaagtggacaaccaggaaattgacgttgatgcagtccaccaagctggttcagatttcaccagttttatcggcactcctatgtgcgcttgcatgcgtgtgtgtagacagggaaatttgcatgatcaccaccagactcccaggggtccctgtgtgcccctcatggtgtcctcatgtacagtcaggattgagaggctcctaccactgctcctgtgtctccttaagctcccctcctgccatccccggttcctgctggccacccatggagaaaggaggtcttgtttaatgtccaccaacctaagagggtgactttctttttttctttttgtgagacagtctcactctgtcgcccaggctggaatgcagtggtacgatctcagctcactgcaacctccgcctcccgggttcaagcgattctcctgcctcagcctccagagtagctgggattacaggcacgcgccaccgtgcctggctaatttttgtattttaatagtaacaaggtttcaccatgttggccaggctggtcttgaactcctgacctcaggtgatccgcctgccttggcctcccaaagtgttgggattacaggtgtgagccactgcccctggctgggggtgactcttttcttaagggcccccaggctttctgcctttccttcccgtggagttgggtctgggctggaggtggtcagaatgggattctaagcccctgctctccccgggtcctgcagacagagtatgctcgctatgagaatggacactactcttaccgcatccaccggtccccgctctgtgagtacatgatcaacttcatccacaagctcaagcacctccctgagaagtacatgatgaacagcgtgctggagaacttcaccatcctgcaggtgtgcggcgggtgctgcgggtgtggctggagtctgtgtgtgggtagcagccatggcatgccccttctggggccttattaacccttgtctttttctctcccacaggtggtcaccaacagagacacacaggagaccttgctgtgcattgcctatgtctttgaggtgtcagccagtgagcacggggctcagcaccacatctacaggctggtgaaagaatgagagactcggggagcagggaggggggaagagacgtgtgtgcaggaaacggggacgtggggaggggacctgcaggggcagccccctgaagtgccaagagagctgagaggagcagttgtgactctacccaggaacaaactgtgcctgaacctgaggtgcccaaccccaaataaacccaagatgctgtgtattttcagagga

SEQ ID NO: 71 - DNA, 73671 bp, Mus musculus
  source 1..73671: mol_type = genomic DNA
gcgaggcgcgccccaccccggcggaggggacggttttcggctggaggtggtggagagacagttaggactcaacgcaacccgggggtgtggggagctggatgagagcgggaaatcggtagatcagagtcaaggggtgtgggtgcgagcggcgagaggcgccgaggggtccgcggggttcccgggtgtctccgccgtgtcctgtcccgtggccgcccgcggttcccgggctccgcccagccgtggagcccagcctctctctggcccggtctcctcccaaaggtgcgggtggcagcgccactccctccgctccctccccagccgcgcgcgtctcattccagcgcccattccgtgcattcctgccgggctcctctgcaaactccagtcccgggggtggggaccggcctcagctacgcgctcggggccccgcagcggtcgccgcggctggaagacttggcgccccgcgtggacctgccgcagccggccgagctctcccaccccgcctcccgaaccctgggaccggtaaggctgctgagttcggaggacacccgcgtcccgcgtggtcccgggcaacactagggggccagtggggcacgtgcgggcggtggagtctaggggctggacagagcagggtcgctcggctgaagttgagactaacgagcctcagccaggcccttttctacttttctgcctggagaagagagcccataagggaggtgtattgcctggaccttgtgcagaggtccccagggtttgagacgccgttgctccccacggtgagaagtgatgggagtgatggaccggagttcccaaactccaaggcactatactctagcaggcagcccaggggcgcgcgccgcggtgcacacacgtgtcagggggctccaggcacacccacactccgtccgattcagtgagtgagttcaaagataggtattactgcgccagcatccttaagttttgggtgttcccgaggaagagatatctgtgcgcagtgactcaccttgcttccaggaggaggatttgtttgtgctaaacgcgaccctgtgtgcatcgctacttgaagaaggtgcttgtctgaaatcccgagtgtcggagtgggcgtgggtgtgcgatgcctcctctccaggactctcctctccaagtcctcgctctgaggatgttggttctggctctgacttcttcctgaagaaccgcggcaggggacaatgtctccaagttctttgtgttcagggagaatttgacagtagtagttggaggtgcccctcttgccatccctgctgggttgagcattgctggcaggaagctgcctacacctgcccccttccaggcagctgtctctgtgagggagtgtggatcctgttctggcaaaatccttagggaactgctggtaggctaagcaaagctgagatctttgtttgcccttaggggctaggatggtcatgtttatgggggtggaccccctaaaaggagaagagcttgttaggttgtttccttttgagacagaagtttcctgcagtttaggctggcatgatacgtccaccttagtaagaggtggctttcattctcctgccactttttttttttttcctgagacagaagcaaaagaccaaggaggccttgaactcacagcagtctcacctcagccttctaagtgctgggatgacaggtcggatttaccaggcttagttgaccactttggatactatttgttgagtggttggtagtgtttctaagttgtcttcaaggacaggggagtcagtgctacctgtgggaaccttgaagcaatgagggggagacaatctctcattcctcaatagccagggtcttgctctggaacccagactgggtccaaactggatgatcctctgcctcagtttccccctcgttcttcacagttagctaggctaccttgtttctgtggggaaacgtgagtggtccctatagggaatgctttagtgacagctgggaaggggaggcagcctcggacttggtagctgaggccaggatattgacaggagagtggtgtgagagtcacagacagacttggcaccagtgttctcgctcattagcacaactcctaggtgatggctagggtttcttggaaggaaggaaggaacagagaaccctgtcaggagcgagggggaggggctcgtgtttacctttccttctctcctgctgatatagattagatagtctattccaccctgctcgggccatgcctaggagagagacactcttatgggttaagatcatgggttaagaaactcacaggcgtggggtcagacagactcaggcaggaatcttgatattcactacctttaaggctcctgggctccgtttcctgatgagtaaccctggggggtggggataggggtgagtaaccaaaatcagggcagaaagcttgctctgaaaactcggtgttcccaaagcatctgtcagcacatcctggtgcccctggagatggtggatcctatgttttcctaagcttgctttggcgaaccccctcctgctccccctttccatgttgagaattggacccagggtcttgtaagactagcggattttgcgtgatggttccctgggcaccctttgggaaaccttgccgtgtatcgtatttattttgcccatggcacggggcatttggtggggagacttccctttgccaccaggtaacgtacttctcattctccagctcccatattctcatttccacttttgcctgccctcaggacatgtttgctgagcactgttggagcctctgtcaatgcccagcccctttgtggggaaactgagacctggggagggaccataacgtgtttagaattgcacaagctctgagtggcagagttgggaccggaacccaagctcttcacgttggattatgtctcctgctttgtgcagcccagtatctgggtgtggagaccctaaccactttcatctaatgtgtgtggagactgtaacagtctgatctggatggtgtcttccatcctgtgatacagatagatgtttgcaggcaggcattttctcttgtatcccagtagaaagtatacagcaaactaccccatggtaggatataagcatggcagtctgggagaatatctggatagctttcaaatctactgtccttcctctaaaggtctaggtatgtgttgggggtatgttacatatgtacatatgcatgcatgcatctatctatgtaactatgtatgtatctatgtatgcaattatgtatctatctatgtatctatctatctgtctatgtatctactctttctgtcattttgcttttttggtctagggatgagcccagagcctcaagtttgagcttcaattcacagctctatcttttccatctctcaggatgcaaatgtcacagcctcctttggcctccattctgcggtcttgtgctggtgactgtcacaaagcaacacctattgccaaacttgtgtctcttccttctcaggggaggtagaagacatcagttcctgactttggacctcacccttcccggaggtgaggccagtctggtggcagttgggaacttgggggatcctgagggtggctttacctctttgcccccttgaccccttgttggcagaagcaggaacaacggctctgtttaaagctctgaaattggagctgaacagctgctccccggcaccctgagggcgggggtgtcaccagctcaggggcccaggtggaggctggggtagggcaggctgcctgcctgcctgcctgggagcatggagtctccatctccagtgtagccctgacatggcagtttttccttgctgtgccgtctgtctttaaggttgtacgttgaggagagtctaatcgcacctgtgtggttgatcctggggctctcagcgagtgggccaggatccatgggaaatttcccaccagaactgcaggccaagatctgtgcccatctgtttgcttgtcatacaggccagtttccagaaaggtaggaggatgagccagctccctggtgtgggccagctccgtggccagggtgggcaggctggtccccatgggtggggacccggcttcctttgacccaaacgcaatgtgaacaatagacttcagaggagtcaccaggggcaggaaatgggagctgtgctaaggccagggtgaccctcctggggggggatgggattgtatccggttgagtgttagggccagtgcagagggcactggggaggggctgatgacacacagggtgggccctggggtggggctctccgcctaagggggctgttgactcagagtgaaacctgagcaggagggcccattctcagactgagcaccctgttgtgtgtcttaccagcaaagatcttgtgtctggcagcctcttctgccaggttcctgccgggcttgccaggccagaaccgtgcctttcccttcccctggagcccccagaatggcttcaggagttgcctaggccgggatgaaagactagtgttgtttcttcctggctgcattccaacctggctgtcctccactttggcattgagccccaagtagtagttgatgggcaggtaatgctgggtagggctctgggtaagggagacagcagccttgggtcacttggacaactgggaagagatttctaaattcacagtcagtgcaagacaggcagggggagattcctgcctaaggcaggtggtggaatgttctagcagactggacacttatcttgccaccatctgtgggagggtgggacagactctgtgtgagagctaaagtgcacttggcttggggagaagcgggtgcctttgggccttggagtggccataggaccactgccaggacccaagagggggtggggcagagaaaacacatgctatcttgatttctttctccaagggacaagatgagcatcctggaaatggagcactgggcttctccttcatcctttgtccagttctagatggttttattctatgtatctgttggttggttggtttgccatgctgagattggatcctagggtctcatacatgcttggctggtgctctgaccccagccttctgtcagagttttacacaaaatctctaggaaagaattgagttcaaagtaacaagtctctagcctgtgtggtctttggatggagaaattgtctttttctttcttttttccgttggtggtcctgggactggaactctgggccttgtgcatgctagatgatctctatcactgagcaacactgtaacctttcaggaaggtttgtcctggcaacaaaagagactgcaatgtgtgtctggctaaaggactagcccctagccccaacaatcatccctccctcccctctcgcccaccaagagggagattcctagtggaagacaccacagctctctctagcttcattctgtcagccctgtgggtgttgaagatagtaagcaagctctggctggcagaaccaggtctgttttttctcatctggctagaattttctaggaggttggagattaagcaaaaagaagacttttgttgttgttgttgttgttgttgctgtttcctttggttttgtcttttgagacagggtttctttgtgtcctggctgacctggaactcactctgtagaccaggctggccttgaattcatgagatccacctgcctctgcttcccaagtgctggggttaaaaaaagtctccgttgcctggtgacatgtaatttttgtttgtctggaaaagcgttttcctccagtgctagagagtgaactctgggacttgagccccatcccgagacctttcaactttggctgtattgttttccaaggccagtttctcaagttggtttcaaatccgttgggtagctgacaaggacctggaacggaagactcccacaggctctaaccccctgtgcgggttacaggcatgtgacacttcacctggttaggtagtactggaggtagaacccaggactttgtgggtgccaggaaagcattctgccacgtaagctacattcccaactcttacttttttgagacagaggcttaggtagcccaggtggacctccataacttaggaacaaggcagtggaattatgaggtctttcttaactctatgacattctacccatgccaagagccatgtctggcatttaaaggagaaatctattctctcaggaagcgtgtttgctagcctagtgtgcttgcctagatagctcgacagagcactggatttcattcccaggacctctaaaagggaaaaaaggacaaaattaagttttctattttatttatttatttatttttgtatgtgtgtatgtgtgacagtttttgtggctttaagtacaaataaaatgtctattcgttttctttgctgtgtggtctgatggcctgttgccttggtgactgatagccatctctgctgctctgtgcatgatagctttgtggatcttggagaacgcattgtggatgatctgagcacctatctcagcacagtaggatttgggataacgtgaggagcacttcagctccttgggtttgtggaccaggaacttcctgaagcctctgagcagagtgtcctcattgtcctcgttgtcctcgtcgtaaccaatgctgggcatcaggatctggccttcgaatctcctccacacagtgttgtttatacccctgggttcccacacttcatttactgactgtgtcagatgaacatcttggacccgttctgtgtgtgtgaatttgtgcttcattagaggtcgaagggcagtggtgatgctgagcaggagcaggcatggaagcaggaagggcttttgtgtctctttcaaatttgtaaaaattttcttttttggtggtggtggagaaacacttttaatcttcactgtgtgaggaattacaagaacaataaattaagccatatgttgaacctaaatttcctttgtacaaattattaaaatacaattgcatttcttttttaaaataatatttattttatgtatatgagtacactattgctgtcttcgtctgaagacaccagaggagtgcattagatccaattacagatggttgtgagccaccatgtggttgctgggaactgaactcatgacctttggaagagcagacagtgctcttaaccgctgagccatctctccagcctcacaattgcatttctaaaatgaaatcataggtatatagttgtagtcactaagtaaactaagttaaatgctgtacattaaagagaaacgtcaatgaggtaaacgtatgaatgaagacacttcttttttttttaggtatgttttctaatatttatttatttattatatgtaagtacactgtagctgtcttcagacactcctgaagagggcatcagatctcattatggatggttgtgagccaccatgtggttgctgggatttgaactcaggacctttggaagagcagtcggtggtcctaaccgctgagccatctcaccagcccatgaagacacttctgaactcccccatttcatcgagtatcaaaacccaccaatcttctagcctgaaaatgcctgacatgcagaaatttttttaaagatttatttcatgtatgtgagtacactgtagctgccttcagacacaccagaagaaggcatcagatcccattacagatgtttgtgagccaccatgtggtcgctgcgaattgaactcaggacttttggaagaacagtcagtgcccttaaccgctgagccatctctccagcccgtaaaaaattttcttgtgtgtatgtgtggtttacctgcatttgtgtttctgtaccatgtgtgtgcaatattcttagacgccagaagtggatgttggatcacccaggactagagctacagatggttgtgagccgctgtgtggatgctggggacccaacacaggtttctgcatctttggaagagcatccagtgctctcaactgttgagccatcgctccgggccctattttttctttctgagtcaaagtctcactaaggagctcaggctggccttgaacccattcttggcctcacaaagttccagatggcctgggactttggatcgcccacttttctgactctgacgagctggatgggattccaggcatctgctacggtgcctgccttagactgtcttacctgaggcttgtggagggattggaaactgatccccaaagctgtcattcctcacagtggaaggcaagcaggccctctttgtggccacagcagaggaggttcattgggtctgaggtcctgatgcagagcagagcgctttacctgtcaacccttggagtcccatcttagaacctgtaggtgttgactgggatgttgtggaggaagtctgtactctcttatctacccttgtgggaaactggaagggatgaccggggtaccagcccttctgtggtactgggccctgagttttcatgttagcttgggaggtcccactagtgatgttaggggaatttttccatcttaccttcctgctagagggaccttccagactggaggtgagggtgtgagagggaagtgtcccggctggtcaagaaagagaatgtgacagttgctatctgctcccccacccccacccccccatccttgtggtagagtcaagccacaccttagtcccactccgaagctaaggtatagggaaggtgaccccggaatgtagtagtaattcagatgtcggaaaagcgctacccaacagatctagcttagaagactgtggaacagttcagtaggagagcatttggttaatgtgctcaacggtctggtttcgtctgaagcaggaggattgtaaatgtaaggacagcttagggtgtatagtaagagtcaaaaaatgtcgagggctcggggtagggcatcagtgggatgcttgactagcaggtggaaaacctcaggtttggctgggcaagatgctcgctgctaagctggtaacctaaactcagttcttgggatccaactccccaaagttgctcttccgcctccgtgctccccatgctccttcagcgggatgtgtgcagctcctcccccaccaaacaagtcaaatggaatgtagtgtttttttttttttttttaatttgtggtggtatacactttttgttttgttttccgagacagggtttctctgtatagcccctggctgtcctgcctctgtctctcccaagtgcatgcaccatcactgcccagctggtggtgtacacttttaatcctagcacttagtgggcagaggcaggtagatctctatgaggttgaggctgctgcgtttctgtatgtagctccaggctagccaagggccttggaatgagaccttgtctcagagtcaaacaacagaacaaaactcggcctagaaagaaagcctagctggtaagagcatttactgctctggctaagcgcccaggtttagttcctaacacacaccagttgggcagctcacgctgtttgtaattcctgccccaggagctccacatcctcttctgacctgtgcaggcaccaagcacacccgaaccacacatgcatacacatacatacatgcactcatgccaacacatatacattcacacatataacactacaaaaatatttttaaaaataatatattaaaaaaaaccctctatactaccttctcactaccccctctaaaactttatattgttttgacttgctgtaatagtatatcattttttgtttgtttgttgttgtttttcgagacagagtttctctgtgtagccctggctgtcctggaactcactttgtagacaaggctggcctcgaactcaaaaatccacctgcccctgcctcccaagtgctgggattaaaggcgtgcgccaccaccgcccggcataatagtatatcttatataacataatagtatatcttatataacataatagtatatcttactatataacagatggagaaaggtcagagatggagaattttccttgcatgtgtaaggcaccctgagtttccgtccctaagactggggaaaaaagtaacatgataaatgatagatggagttattcatagttggcattattcaagtattgaaaaatcacacttaacagggcgtctcaattcagatcagccacacctcggtgtagcccgccacctggggtcaatggatactgattgagagtgtatctttccagtcagcctgcttgactctaagttactctcctgccacctaataatagcagtgggtcccaggaaggtttttctagggcaggttatttagctgtatggcatgcctcagtttcccctctgcagaatgaagataaaaaaaaatgctcatagaaaccctatattcagtggctcaaacctgtaatcccagcattccggaggggggctgagtcaggagaatttcagagttcaagatagccagagctgcatgagagcctatctcagccaaagaaaggaagaaaaaagttaatagcagtttcatagttgaagtgaagattaaacgagttagtgtataaagtgttttggttcttgctgggttccacctaagcactgtgtaagtgcttgtcaaataaatgacttatggatggtccttaaaaaaaaaaaaaaaaaaaaactcaacaatttggaaattttaaggtgatatgcttggaaaagtcaaatagtggaaggcctggggaggccgggtctgacccccaccatggtctgctctgtgaaactgatttatgacagctctgaggtacaatagaaggtctagtccctggcctgatgataagtgctccacagagactgactgaataatgacaatcttcaagatgaagaaagagtaattaaggtccaatgactcattgtgatggggctgggaggagccaaggaaggcttcctggaggaggtaggggagaggctttgtgaatgggtcagctgtgacagtggaagcaggagatggggacacaggtagaggaaaaaacatctttgtagactgaggactattaccatgcagtgaccactgtggcagggcttatcaaagggggagatctgtgctgcacacatcaggtaggatggaggtgtgtgtgtgtgtgtgtgtgtgtgtgtgtgtgtgtgtgtgtgtgtgtttgctggaggcaggcagattaccactgagctctgcccagggctactttaagtttacatacaccaaaacatgctcttgatggtgtgctgtttactggtttggacaaaggcatggagttgtaagggcacatcacaattaaggtacaagacagttccaggtccctgtatctcttcatttacagccacctcccctcccccacgtttgtatcttggcagcaccaatctggtctctctctaggcctgcagttattttgccttttcaagaaagtcatgcaaaccaaaccatacagttgtatagctttctgggtcaggcctctctaactcgccatgcctttgatagctatccaaaccgttccgattgttcaccttcaccttgtaccgtcttagtcctgagtagtctccattgctgtaaatggatgaaccacagacagtgtctctagtcatcttaggttttccagctagttgtgaataaagctactattagcatgttttttcctgtttttttttttttttttgtgtgtgtgtgtgagcacaggctttttatttttcttgcataaatacttaggaatgggatggctgggtcttttgtaacagctatgtcgaatatcttgtcgctgctacatgaggccagggagctggttgagagcactggctgcttttcccaaagggtctttgttcagttcccagcacccgttcctgggatttggcgcacctcttctggcctccatggtgaccaggcacacagtgcttgtggaattcacatctccatgcagagacagacgctcatacactgtatttgaacctgccaccctggtttccaggatgcactgttttgcgattctacttagcaacacgtgagtgtgttccacgttcagcctcccagcagggtgttgctgctatttatttgttctatgtgtatgctgtaccacttgtgtgtctgctgcccacgggggccagaagttgcataagatcctgggttgggcagtagttgcgcagagagagaggcaggtaacctggcttacagggcaagttctaggacagctagggctacacaaagaaaaccttgccacaacagcagcagcagcaacagcaacaacaacaacaacaaaacagacagaaaaaaatcctttgggaattgcagttaaaggtggttgtgagccacctcatgggtgctaggaacaggagctgggtccctgtaagaagagccagtgctcttaactgctgagctgtctttccagccatgttttatattttctaatggttaatgatgttgaacatctcatttgattataactcatttgcgtataactatagtgaagggtctgtctgatctttttaagatttatttatttatttttgtgtgtctccgtctgtgtaccatacgtgtgcttggtgccccctaggaggtgggaagccgccatgtgggtgctgtggatggaacctgggtggtctatagagaagaggtagaacagtgctacccctccccctcccccatcgtcaaccccaccatcacccgtgaacgactgctcctggcttagcacccgctgtagaacccacttcagaggaagaggctcaggttccggtgggcatcctctctggctggccagtgttaggtacctggtctttcatgcatggtgggtcaggcaaatctatctccacccagaaaaaaacaaagctattgccccagcctgcacctcagccatttacatggccttatttccaaatggaatgaccatttgttctggaatgggaggtggggtgcttggcaggccttcaggggtgctgggggtgtggctgagactcagtgggactcagtggggtgagttttctgggtcagggtggctcctctgatttggtaaccttggtccagtgtctctgtcttcttccccatctcttggctctcagacatttctatggtaaacgagccaaggctagatggatgctgcctcctatctttttttggagctgggccttcgtgtgtactggggggcatggctctgtcatggtagagtgttccttctccatgaaggtcttgaacttagtgagggaccgagctccagctactggtttgtgcttcacctcagatcctggatggataagggtagccccgagtgcctgggggagtaactgagggctagcccaacctaaggctggggagtaaaccttagtgtgtgcagcatctgccccaggggatgcatgatgggagtccgttctcttctaccatgtgggtcctggagattgaaagcttggctgcaggtacctttacctactggaccatctttctggccctaaatagacttttttcccccctttcactatggagctgtggttggcttggaacttggtcagtagaccaggctggcttcaaactcacagagattcaagcttgcagattgactctgtctcctgcaccaaacccagtaactaggtttaaaaaataacagtttgggggccggagagatggctcagtggttaaaagctaaaggcctgcgttgcttttgcagaggatcttagttcacttcccagcacccgtgtcccagctctgtgtcccagctcaggatctcaactcgagcgctgggggatctgacaccctctgacacgcacgtgcacgtagccaccaggcacagacatctgtgcatacacataatcaaagtaacaaaggaaaccttaaatatgtttccatttggagtttatagacaatggaggagaaagtagagaggccccagatttatgcctcttcccccagtttttctgattgctaatatctcaagtcagtgtggtgcccatgggatagctgagctggtgttagcaggcagacagcttgcagaaaggcttactctggggctcagagcccgcataacggtatgtactcaccatggcagtaccaggcaggagaattccacagccctaaaagtccttttcatctttaccccaactccagataacctcatgcttcactttatccccttgagacagggtcttcctgaacctggtgatggggtagtggctagcaagccccagagatctgtccgtcctcccctcctcttccctcctgccctgggaggtgcaggtctgtgaaatctcaactcaagcatttgcccagcaagtattgtcacccacagagccgtgtctctgatctgagctggcgggcgtccttctcccacctctcttaggctgagcttgaaactacagtctctcaagactcttatcttcctcagtttctctgggtttgtgagccccccgtgttttgtcgtttctaggatggttgagaaggcagagactcatcttttcagactcttcccccatggcttgatagcaagtgccttttttcatatctgaatactattccacagtcttgaccttttctttttggagttcaaagaggcccagtgtaagctttctagaggttccagcagtctatggcaaacttgagtctaattctcccccgcccccccccctccagcccgtttccaggggtgtaaaagcgtgtttcctcatggccttgttgcccactgtgaggccccagactgagggtggaggggtgtggaagccagttgctgtgacccacttcctggaggtattagggacaggtcggcagacacccacagctcagctgtttggaaaggctagcttgggtctggctccgaagtttccgaagaacagaggctggggtgctgatatgagtagggtgtcctccgcagccacgctcaggctgagcttgagccctgtggtctcttaagactcttatctccctccatttctctgggtctgggagcttcccttcccacctctcccacgtgaggctccgcccgggtttcctttccccaagtgcttccccgcccacttacggctctgcctttcattcctcctgattcacacacagcctccccctcctccgcccctccctgcaacgctgctgtaactccaaggcagtaccctggtactcacggccaggctctgatggattcacattgtttatgtattggtttgttggttttagagacctggggttcatctggagccttgcctgagtagctcagaactacctaccaacaggccaggacacccgaaccctcaccactagcggcatggttatattttggatgagtttacagattggtcttgaatttggggctctcttcctgcctcagtccccagaattctgggattacaggcattaattcaccatacctggctacaatttttgttgctaaggttcaaactctgtctggctcattgcatgcaagtggacactcaaggagctgagcagccacatagctgataagagctaagttggaactctggaagcgtcttttaagtaaactagattctaatcgaaatcagaatgaaggcccagttagtggtgattgtaggcactgggacacctaggtttggcttgatcccatctgtgcattgctgggatggagacaggagatctgtgaaaggcaggtgctagttcactgagccaaacccttcccaagtcatagcacacacacacacacacacacacacacacacacacagaggcacacacatagattcacacacagagagacacagagagagagacacacacagagacacacagacacacacatagagacacacacacgtacagacacatacaccctcacagacacacccagacacacaccctccacagacacacacagacaaatacagacacaccacacccccaccaaacacccctacagacacctacatacacacacacagacacacagacaccccctcccacagatacacacacacagacactcccccagatacacacaaatacacacacacacaccatacacatgcatacacacacacatacacacaccacacacacacacacacacacacacacacacacacacacacacacacacagtagaaggcctctttcccatctccagcaagccggcctcatctttagaaagtcactctggggtcagtttttctggctgagtaagtgggcctgtgcccagggccggccccttcgcttgttttctttcccctgctcgttctccttcctctattctccaggaaccatccacccaccgctgacaggaaactttcttgtttggtcaacttcatttccaactacaaacaagccacctttctttgtcatctgtactttggggtcccctgaagtgccttctccgtcacatcgttttttcttcctgactcttttttttttcccctccttttttctcagggtcttactatgtagccctggctgactttgaatctgctatgtagatcaggctggtcttgaactcactggtatcctgcctttgcctcttggaattaaaggtgtgtcatctttcctggctttttaatgacttttaaatgccaaggaacagagataaggtggtagttgtctgtaacccagcacctgaggcaaaagcaccataggtccaaggactctgtgtgtgtgtgtgtgtgtgtgtgtgtctgtgtgtgtctgtgtctgtgtgtgtgtgtctgtgtgtctgtagagcaagcccacacctcaaacccaacagataaacagttcttatggtaaaatactacaggccaggcctggtggtgcagatttgcaatccagaggctgaggcaggaggattacaaattcagggcctgtctgggctttacaatatatttgagggcagcaagagcccatctcacaaggtaagaagaggattggtaatgagcttaatgtagaacgctggcccagcatgtgtgtgaggctctgtcttcaatccctaggacctcaagtagtcaatcaaatatacacatggaaaaataccctcgtagcgtgttttggtttttcttcccttccttctgcctccccctcccctctctccttttttgataagttgaaattagccgggcagtgaatgtacactgtagctgtcttcagacactccagaagagggagtcagatctcattatggatggttgtgagccaccatgtgtttgctgggatttgaactcaggacctagggaagagcagtcagtgttcttaaccactgagctatcactccagtccatgttgtataatctaagatagactatagcttgcaacatagctcaggctggccaagaactcttcaggactggctgccttggtttattttggggggcccggtttgagagagaatctcactacatagacaaaggtgccttgaactcactgagctctgcctcctgagtgctgggttaaaggtgtgtgggatcacaggtgtgcactaccacttgactctacgtgggggtagctccggctgagtttcacaggctggcccgcaacttgcaatccccttgcttcagtcccccgaacactgggcttgcgaacatgtgctactatgcccagcttttcatcgtaatacgtaatttttagtttatgtgtattttgcctgcatgtatgtctgtgcaccatgtgtgtgcagtgcctcctggatgctggaagatgtcagatgctctggagctggtgttagagatggctgtgcaccgccatgtggatgctgggaaccaaacctgggtcctctgcaagagtagcagccgctcttgaccactgagccactacttcagctcctctgcaaggctgactcctttacatctgcagttttgtgcttaaacacctatcactatcaccgtcacccgttcccttaacgttttatccttgcctacagaatctctactgaaaaagaaaagtttttctctctcctcccagcttctggtaactactattctcctttctagctctgaatttgactgttgtaagtacttcttgtaaaagtggccaaagatggaggatattgtgtctggcgtcttctggctcattccactttgtagaatctgttccgtgttcacccatgttgaggcatgtatcagttattattgtttttttctgattggatactattccatcgagtggttataccatatcttgttttttcattggttgagggacacctgggctgttttcacctttggagaattctggaatcttcctgccggaagctcacctcgcacactggctgtggtactctgagccttgagctcagcatcacccacccctccacagtcctttacctatgttattctcagtaggcacaatttctttgtttgttctttgagacaatgtctcacgacttggtccaggctggatgtagactcagtgtctttcttccttaaagagtcctgggattataggcttgtactgtcacacccagctgacccactggtgtttttcatggtaattatgtcctataaaggcaccgagttaacaaatcctgaatcattactcataggagaaacactgggttgcattcatgcaagcctctggtcacaagatttttgtcagccaattaacttacaggcttgttttgtgggtgcttcagttccaagacaccttgcttaatgtacagtgctgattcactgaccctgggcccagagcagaactcatggctgctggaagcctggctagggcacgtgttttctccctcaggcgcattccagcctctggtgcttaggaacagacagttctttgcttggggctgttcaatttgcttttgtaaggatctgtagtgtctgagcaagcgctgagggttaattggtgtgatgctgtgcttggcagcttagccatgaagagttaagtaaatggagacagtgaagcaaaataagcttggagaagataaaatgcatatgtgtgcatactacacacacacacacacacacacacacacacacacacacacacacacacacacgtttattcttttgtttttttttttttcattgatttggagactatatcccttgccagcttgaaacttgacaatgtcaaccaagttgacctccatcttgtgacccttctccctttgttcctaagtgctggagttcccagtgtgtacccctgtgcctggtggcagagtgtaaatatgttttgtgttttacagagagtattttctctctgtgtatatataatagcttttactgtcttaattcacagcttgcttgttcctacataagtaatgacttcttgcaaataacatgccttttttttctgtcaattaacaaatatcacatgcagtttgatttttttttccattcatacttgactgaaatattcagctaaaaaactaagaatgtgtgcgtgcctgtgtgatgtggagttcagaggacaacttgggggcagttaggttttctccctctaccacatgggccctggggttggactcaggtcattacaggcttggctgcaagcacttttacctgcggaggcatctcactggctgtgggtctactttgaacaatgaccctgtaggtcatacctgtaagtctggccttaaggaggctgaggcaagatttcataattcatgggcatagaatgagattatggaaggatgcatgtaggttatacaggacacacacgcttcagaaagtttgagttcctctgcctgaaaccgtgccctggtggtcaccagaacccatagatgctcaggtcccttctgtaaacactccctggtgatgttggagatcacagatattcctgatgactgtgatttagagaactgattgtacttgatcttatggatgactttgggccctccttccaccttgtacacatttgatagaaggacattgcaggcagggccaggtctcacgtggctttgtcaccagtgcctggcatgtagcgcttgctcataccacttattcttctgtatttactttttgagacagggtctcccatagccttgatctccagtgtagcccaggatgaccttgaattccggattctcctgccttagtgcccctcccttgtgcaattctgaataaatcatggaaaaggatgggcgtggcagctatgaagagggagatttctctggctctccctggctggggcccactcctttccttcttgaaagtatcgcttcttgttactgggagacatccaggctgtattcacaatgaatcagaatgcccagggctcagatgtcccagtcccagcctcaacagttctggggccattgatggccacttccctttctagggtttcaatctccttacctaattcagacatctccaggtcccctctgcaggtctgtttctctctgacacaaaccttagggagtagcagacgcctctgctgacgtcaacgggggcggggcgggggcggggacacgggaccactgctcccatcttaaagggaataagagatcgtttatagccattatgagtgaccgtggcccaggaacacagatttaggttaccccaaaattccatgttccagtgtagaagcagttttacagattattgagagtttcacaggacaaagaaagtcataaggcaagtttggaatgcatcagtgggtacatcacaggtgcagaatcagtggggttggggatctagtctataggcctgagatgctatgtggtgacactcttagcaacgctgagaggtgctagtgcctgttaatagtgtctaagaggttttcagtccttgggaggcagaggcaggcagatctctgagtctgaggccagcctggtctacagattgagtcccaagatggccgggactacacagaagaaaccctatctttaaaagccaggaaaaaaaaaaaaaagaaagaaagaaagaaaagaagagaaaagaaaagaaaagaaaaaaaaagggttctatttattagcacatggtattggttcagtacagaatggggtaaggaatggctgttctaaaaagttaaaactaggccaaaataagggtattagtgtctgaacctacaaaattccgatctccccactaatacagtttcaatcggtccacccgtctctgcagaaactcattccaggagttttctgtttccagacagacacagctgcttttcaggaatttcattcacagtgaaaaaaaaactaggaaagctcactgcacagagagaccgcctggctcctcagcgggctaccctccttacctctgatttatatccttcctgctgtggtcagtcagatcgagttccctgctggtgacttgctgtgaggaagagcctctgagcctgcactggctagctgtgggggcactgcaccatgaggtgtctcagtttctccatctgtgaaatgtgctgggcctaaccagctcagaggggtatctggagtgagggaagacatagcctaatgactagtccagagcttgacactttaaggtcatttattctcagggtagaacgtgttcctcagtgtgcaaggcaccttctgcagacacctagttctgtaggcttctctaccctgtgtgtgcatgtatcaggaacaggatcatgggaggaggctgggaaggtggtcactctaacccagcgctgcggtcctctcatcagactgcctcctccccctctactcctgggttgttgctgagcattgaagacaaggtggtgggcagaggcagcatctgccaaagccaagggacaccatccagctttgtgctagtgtgtgctgcagctggaggcatgctgagcttgtgtatcaccctgtgactcctacctacttccaccttagcatgacttcggggcagaatagctataaggtgtgttgcttgagaagggaagtatcctgaatgattcatcagggattccggaagagaagggaggggaggggaggagattgtctcttccttttcctcctttgtgaaagtggaggatcaatcctagagccttgtgcctgcctacatggtaccagacaggtatacaaccagcctggtgtttctctctgtctcttttttttttccagatttttttttctttctagattgggtagcctgcccttgaacctcctacttcagctttcttattgtcagggttaccaacctgcatcactatgctggctcatttttatgtttttgagacaggtctctctctatctgtggctggcttggaactcactatgtagccccaggctgcctctgaacttgtgatcttcctgcttctgcctggtgagtgctggaatttcaggtcataatgcattgcctaacttgttttttcccctttcctttcctttccttccttccttccttccttccttccttccttccttccttccttccttcctccctccttccctttctttctctttctttttgttgttatttgtttttaagacagagtttctctgtgtagcactggttgtcctagaacttgctctatagatcagactggctttgaactcatagagatcagtctgcctctgcctcccaagtgctattgaaggcatgcaccacctctatctggccattttttaaaaatatatgtttaaaaatatatagttgtattttatgttcattgttgtttttcctgcatgtatgaaggtgtcagaaaccctgaaactgtacttatagacaggtgtgagctaccatgtggttgctgggaattgagcacaggtcctctggaagagcagccagtattctcaacttctgagctatctctccagccccttcattctttctttttggagataaggtcagaatagtgaaggctcaaagtctcttccctgccttccttgaatgtttccagggctatcttgtactcttgcttcagttattgtataactctagatagcaacgagactatggtatagcgagcgtctgatctggtaggactagccagggctcgctagtagtcaggagccattgtactagatggagccaggcctcagtagtgtctctctgaccaaagctagactagatcagggcagagtatctggggtttagatttgttatttctcgtcctactcagcaagccatgcagggagctctgccagcccaggggatgattcctgggccggggtagtttttaccccaacctgtccccattgtgaacttctgcagctgttctgttgtgtcccatgtccttaagttagggtggtatcagagtccacaggcagtgagggtggtggtgaggctggacctttgtcctacacctccaaatctctgagagtcagtggctggagaggaggccagcgggaaccacgtctttctttgtgcgccactctttccccatttctgttctttcctcatttctgtgtaatccagggatatcttgtaaacattctgagtttcaatttccatcacatcctgtttggattggagactgtgggggttggttatagatcacatattgacatcccatgagttaatgagcacagacagtccccagggtacaaaggtcaacatgtgacttttctgctttacaatggtgtggaagtgatacactttcagtagaaattgttctttgaaacttgagttttgctgttttcctggctggtaagaaacagtatgtttctgccatgtgggacagcagctgtgagccgtagtgtctagccagccacacagccatactgttgccaacatcccttagatgtgggtattgaatatatttcaggagatatacaaaacggtagtgtaaaagtatgcaggcagggtgtagtattgcatgcctttaatgccctcactagggcatcagaggcaggaagcactctatgaggtcgaggccagcctggtttatatagagagttctaggctagttaggcggttcagagttacgtagtgcaaccctatctcaaaaaagaaaacgacaacaaaaccagttttatattactgctctaacataaacacaaaaaacaactcccactgtggagctggggagctggctcagcagttaagagcactggctactcttgcaagaggacctgggttcggttcccagcacccacatggcaggcagcacatagccctctattactctagttctggggatttaacatcctcttctgaccttccgcaggcacggagcacacaggggcacatacatatgtgcagacctaacacccatacacataaaatctgaaactgtgtagaaatggaaattaacattgctttgagagtccatgttacccccgataagaatggggtgacatggacatatcatcaaaaactcagatgactccagatgatggtctcaagctcacaatcctcctgcctcagccgccagaattctgagataccggcacatgtcaccattcccttctacattagggtattattaactgactagtaagtttaccagaatatcctattgtgtgtgggagaacgcacacaaaaataacagtgttatttttcctggcctaaagaaagggaacctttggcagagtcggctcattaacagtaatgctgactgcctaagttccggctactgagccaggagcagggcagactctgatgtctgagcgataaccgtgttctctggtcaggggacaggcaagcacagtgaaatcccagcccacagcctgtcacaccagcaccttatactgactgtgtgttgtgtctggggatgtgtactgactgtgtgccgtggctggggaagtatgggaggagagactacaaggtggggttgaacagtccctgtggtcttgtgggagattgaccagcatggagggtccaagagcttggctggcaaatactctatcacagagctacaacagtagcagtctagcccctagcagacttctggcttgctgccttgctgtcccaatcaaactgtcctcagtaccaccaccgtgctgctctggggcagtgcctctgtgtatgacctcaggggcagtgtctccgtgtatgacccgaggatcctcattcttttctgttcctagaaaagtacttagaaaaggatccttaaacaatcccaattcctggttcttctgaaattcctccatagcccgcacctgtgggccttggggtggagtggcgtggtctttgggcctggttgtcccaagtaggacatctgttggcttttgggtggggcagagacagagctggaagcctctgcccagagcccaagagccaattggagaattatttttatttctctggccatagcacatggtctgggtggtgctgccatctgtctcccaccctacctctctcctggctggcggtccctggagggtcacttgagggaggagcaggggtaaagaatgtctctgggctggagttgacttaccccattcttctggccgcagggcaggctgtgtgggcagtttgcctaggaagagtgggagcggccagccagtcacaactggggagcaggagtaccacagccacacagccagggacagctcactgcagtaataaatcctatgttctagggccttgcgtgacccgctgccccactttccctgggacagacccaaccttgggaacatggagtgcaggtcctcagaagacctctcccgtggggctgtctgacacaactggtctctggttctctttaggcctcttcttctgggctgttttgggcccagcattggagtgtaggagaaggtaatgttgaggaggggtagggcccagaaactacctcctctggcagggcggggaggggcggggccggtggggtcacataagatagtatggggctcgctgcctctttgtcttgccctccatccagctcagagtgtgtggctgtgctctgtcaggccccagaagaaaatgaagcctagcagctaaactaatggggtcttatgcattagaaggttaattaattactgtcaagatattaatcatcattacctatgtgtacttgcctggcctgtttaaggtttcagaacttgtatgccaggcttggagcttcagaacaagggttattaaataccctgtacatagcacagactggaggcaagccctgtagtagactgcacgccaggcccccctcccccatgggtgtgtgttaggggagctcaaaacctagggccttgtgcttctagtgtaagaactctcactctgagttagctccgtagcccagtgtctgcgcattcaccgctgtgggagcaccctcctcctctgagtatttatagggtgcactgggaggcccatggagaaatatagggttcaggtggactgtgcgccacagacattgccagcacagaaggaaagaactcgggtctctgggtttcatgggccagagcaatgatgtagcttacaggaggtcactgttggctctagggaaggagccatcactggtcggtctcagttctcacacagaatggctctttctttctttctttctttctttctttctttctttctttctttctttctttctttctttctttctctctctctctctctctctctctctctctctctttctttctttctttctttctttcttcttctttaacctgaagccagaaggaaaaacagagccaaccaccatgagagagcttgagagtcacttcagctgtgagtgcagaatctgcttgttagaggtttgagaaacatcttgtggaaatttttaaaatcataatctcactgcatttgtgttgtttccccacacacacttacaaattaaacttcatttggtctcactgtgtagagtcagctggcctggaacacccttgtagatcaggctggtccttaactgacaaagccgcccacttctgcctccctggtgcctcaccactgcccgactttggggagtgttggaagtgttcagagccagcatccttgatcttaccggtaacttaaaggatatcgtctccattgttctagtaggtgtccaatttgtgtacgctctcaaaagatgtccttgctcaggttgaagaaatcagttttcttctctatcgcctttcattgtttatttatttgataacagtcattattgtgaagaggtcttaggtttgatcaagtggataacggggtgctttaccatgagccacggttgcgttagcttctgttcctgtgtactctccgtcctgccagagcctttgctcattctctgtggattatcttctcacgctagtttcctgtttgtatttttcacacacctccattattcctgtcttacatttctactgctgggtgggataaagatcatgaacaaagcaacttggagaagaaagggtttgtttcggcttacagttttggtttccccattgaaggaagtcagggcaggaactcaaggcaggagcttggatgcaggagctgtcccagaggccacaaagagggctatgtatcagattgctccacatggcttgctcagcctgctttcttattatacaccccaggatcacctgcccagggaaggcagcacccacagtggggtgggtgggtcttcccatgtcaatcattaatcaagaaaattgcctagagacttgcatgcacaccattctaatggactctctttgagttgagatcttgtcttcccagaggaccctagtttgtgtcaagttggcaaaaaactaagcagcacaattccctgttcttttctctctctcttttaaaaaaaacatttatcttactaattttatctttataactatgtgtagttgtgtgtgtctgtgtaggtgagtataggcatccccacgggtcagagatattggatcttctggagctggggttacgggtaatcgtgatcatctggtgtggggatgctgggaactgaactggggtcctctgaaagagcagtatgtgcttttatgtgtatgggtggtttgtctctgtatgtgtctgtacaccatctgagtacctagtgcctatagaggctgaaagaaggcatcagatcccctgaaactggattttacattgttgtgaactgccatgtctctgtgtgtgtgtgtgtgtgtgcgtgcgtgcgcgcgcgcgcgtgtgcgtgcacacacatgtgcaggtagacatgtgccgtgggacacgtggagatcagagaacacctttcgcctgtctctgcctcctatctcattgtatgagtgctgggagctcaggtgtttaccaaagcgtccagctttttagaggaccaaactcaggccatctggctcccgcattgcatgcttttacccacgtaaccatcttcctgtgctgagtcacagtctcttgatcctgactgtggcaaactggctcctgaatctcagggattctcctgtgtctttctctcattgacagtagaatctctgacattacagacatgggccacttcgttcaacacgtgtgtctagggatctagactcaggtcttcccagttacaaggcaagtgccttacccacagaccatctcccaactcttttgttggggtttgagttctgggtgagagctactttctccaacagtttggaaatatgttattttgagtctttttgtattactggtgaaatccactattaatttaatacttctttctggactcggggttggctcattggtacagcatcttcttggcatacaagaggtcctaggttctatgcccgtacagcaggctcttgctgtagataatccaccctttttctaatttgctctttttcatccctgatgcttttacggcatcagttttgggcattgttttattttatttgaatttatcctgattaagattcatatgggggctgtgagatggctcagcagataagagcaccgactgctcttctgaagggcctgaattcaaatcccagcaaccacatggtgactcacaaccacttgtaatgagatcttatgccatcttctggtgtgtctgaagatagctacagtgtacttatgtataataaataaatctttaaaaaaaaagattcattatggttccataatcggaggattccgatctttcatcccctgaggaagtttcctggccagttgcttcttcagctgttggctttgctttgtttgtctatgtcacccctttctggaatgatttcttgtgcccataggggttgaactgaaggctgtgtccctgctagacaggtttcctgtcagtgagcaacagcagcctgcatggcatcttcatctgtcaacagtgtatagggcccagacaggacttatatccactttattgcacatcaacctgatactctgtatccattagacaattccccatttctccctccccagcctctggcaatacctactgtgccttatttctaagaatctgcgttagcttctatatgtatacctatacatatgactggcttctttcaccacaatatcattgccaattgcccgtgttataacaaatggcagggcaacttcctccttagcgctaatattatacccatgccatattctgtattgattctgatgaatgcagggtggcctccagtttttggctgttgtgaatagtgctgctttgaacattggtatacatatgtctcttggaactctttctttcaattcttttgaatatatatatatatatttttttttcacctcccccgtaatatttaggatccttttcgcccagagttcattaatgtccgattgaatctatctctttgcctttgttttctacttcctagccttgtgtgtgttcttagaggtacagtcagggagtgtttgtttgttttcgagacggggtttttctgtgtaggcctgggtgaccgggaactagctctgtagaccaggctggcctcccactcatggagatctgcttgcctctgcctcccgagtgctgggattaaaggctcactcagaggggtcttttatgctcattgggcagtttagaagcttggtttgctgaggtaaaacaacctgttcaagcctccctgactcctgacccccacccccacccccacccccagacctttcactttgttccctgagtaactggcctgtactacttgggcatcctgcagtgtgcaccattcttactgtgccttgttttggctctaacaggtccaacgggcgctcctccaagccgagccttggagggcaaggccggcaccattacctccaacgagtggagctctcccgactcccccgaggggagcagcatctctgggggcagccaggcactggacaagcccatcgacaatgatgcagagggtgtatggagccccgaaattgagcgaagcttccaggaggccctggccatctacccaccctgcggccgccgcaaaattatcctgacggaggaaggcaagatgtatggtaaggagcctgtctgagctgggcggaagctggccttgtagttcagcaggagtggacacagtaaccttggggctctcccaaatggcctcttgtggcttcaactgagtgcacagtgctttcttctgtcctgagttctgagcatctgagaaaccaatgggtgatgagcatggggtctggtgaggagactgtgtactagtagaaaaaaaatgtctgttcagagacagggtttctctatgtagccctggctatcctggaactcactctatagaccagactggcctggaactcagagatccacctgcctctgtctcccaagtgctggggttaaaggtgtgtgccaccactgcctggcaatagagaattttatgaggattatcaggggtgtaatagactatctccacagagcagactaaaaattctttgtctctgtctgtctgtctgtctgtctgtctttgcctctctctcatgctcttgcacatgcatgcacacacatgcacactccatcataagcaaatgcttgatcttcatgccaccaaccttagatacaaagagtaacaaaactggggactttgcctgggtgtcgctcagtagtagagcatacttgcctagcattaaggaatgtcccgagtttaatccccagcagcaaatagaagggggggaaaaagaaaggaaaggaaaaaattgaagggattcttttggagtaggactcctcgtgctcccttctcctcctccctgctccctcctccctcctccctcctccctgctccctccatgtatccagcacatggcaaacagcagttggtgcagcaggtgtggttcgtgtcatggagtggggacatggacacacacagctgacagttctctcaggcaggctgtgagagctatgccttccttcagggaggacccccatacccttcagcttctcgagtgaccaggatgtggaacaccacatttagcaaccatatgggaaggaccagcaggctatatgagtgagtctatatggctttggaggagaggattctgggaaagttaaaacagaccaaaactgaatagctagagcaagacccaggtcagagttagatcaggcttctgcgcccactggaaacatcccacctcagggattcgtgcttcaaactgtatgttgaggggtggaaacccagaggtttgagaaggcctctgcaaccggtgacgttaggacagcagagggttcgaaggccagctgccactcttgctccaatggatttccactcatgagtgtctctccccactccccacagcacagtgctttttcagctgttagagagccactgtgtaggagatctgagtgtattagtggttgtcaccatagagtaacaagttctcacaagctgcttcaatgttgaaaacaacagcaacaagctggggtagcttggagggagagtatgacctcggcttgcatgaataggcatggaggtggcatgcagatagaagcaggcaaaggaaaaaacggaaaacctgtttatttttatgtgtatgtgtgtgtgcctgagtatacatctgcaccacatgcctggaaggtcagaaaggacatcagatcctctggaactggcattaccaagggttgtgagctgccacatagatgctggaaaccaaatccgggttctctgaaaaaacagtaaatgctctgagccatctctccagtctgcctcttaccttacaaagacactagtcactgggtttaggatatgttttagttcagtatgatctcagcctaactaaagcacccacaaagtccctgtttctaaactgggccgtgggttgggctgtggtacggttcagtggtggagtgttggcccagcatatgtaagttcccgatcccatctccggcatcacacattacagggtggcccgatgctgaagttacaggtataagcaagctctaggggcttcttagtcttcagcatccctcagctgacaaactgaagtccagtcccagggctgggggcaatagagctctgccagctcctggttttgttgttgttgatgatgttttgtttgctttctttctcttttttccatagtcttccccacaagaccaaaacagtgcctttcttttctttggttccttgctcctttcacgtcagaccccaagaccccagctctgctccctgacaccagttaagaactccccatctctctctgcacccctcagttcccagaggcacccccttaccatcccctgctctgatcacttccggttctaacagttgctcctccaggggaacttcctagaggagaaagctgacctatggaacatgcatagggtaccagctgggggcagagctctccatggggtatcctcccatagctgccccagatccacgggctctttggtggagagcagggtggatgccaataatgagatcaagtgtgaaggtgggaacgggcaggaggtatattgagaagcagggattaacaggaagccagagtgcgtgcacaggatactgagaaggaattactgtgtatggaagcagatgaagtacaggaatcactcagcagagggtagcggctgagggtactacagtgactgagaagggccccgaggtgaagccagactgtcttagagtttctactgctgctgtgaaacaccatgaccaaaagccagttgggaaggaaaaggtttagtccacttatgcttccacatcactcaagcaaggcaagaacttggaggcaggagctgatgcaaaggctgtagaggggtgctgctttctgccttgctccccaggacttgctcagcctgctttcttatagaatccagcccggggtgaccccagtgacaatggcctgtcaatcactgattaagaaaatggcttaatcactgattaaaaaaataggtttgcctgcctccagctctacctgaaagaggcattttctcaattgaggctcctcctctcagaggaccctagcttgtgttaagttggcataaaactagctggcacagtgacccatgccaggaaaattagaaagtttgaggccagcctaggctatacaagacactgtctgtaaacacagggtgggcaagatgcagggaggatggctcaaatctttcagcagacctgagttcagttcccagcatccgcatggagcaattcacaactgcctgtaagtctagtcccaggggatctgaagccctcttctggcctccacaggcaccattatacacgggacacacacatacacttagtaattgtcttagtcagggtttctattcctgcacaaacatcatgaccaagaaacaagttggggaggaaagggtttattcagcttacacttccatactgctgttcatcaccaaggaagtcaggactggaactcaagcaggtcaggaagcaggagctgatgcagaggccatggagggatgttccttactggcttgcttcacttggcttgctcagcctgctctcttatagaacccaagactaccagcccaagagattgtccaacccacaaggggcctttcccccttgatcactaattgagaaaatgccttaaagttggatctctctctctctctctctctctctctctctctctcttttgggtttttcaagacagggtttctctgtatagccctggctgtcctggaactcactttgtagaccaggctggcctcgaactcataaacccacctgtctttgcctcccgagtgctgggattaaaggagtgcaccaccacgcctggctgagttggatctcatggaggcatttcctcaactgaagctcctttctctgtgacaactccggctgtgtcaagttgacacaaaactagccagtacagtaataataataataataataataataataataataataataaatgggcagggagattgtttagtaggtaaaaacatttgctgccacaagtctggggacctgagattgattgatccctgaaattcaggttaaaaagtcagatggagaggctggagagatgactcagttgttaagagcacaaggctgctcttgcagaggaccctggttcagttcccagcacctacatactggcttaaaaccatcctcagctccagttccaggagatccagcacctcttttggccccagtgggcaccaggcacatgctatgtacttccatctttgtagatcaaacactcatacacatgcagtaaaaataaaacaaatcttttaacaagatagatagatgagctcttctagggcaagatgggaaggtcattcaaaagcagaaatgagagaccccctccttaaacgcaaggtgggaggcagctccaactcccaaaagtcattggctgatgtcattgtctgatgtctactggatgcacatgtggtatgcatgtggtttctctccatctaccccaccccgaggcctgaccctgcttatgtacacgtggtcggtctctctctctctctctctctctctttccctccctccctccctctcacatacacacacacatcttttttttcaaggtaattaagcaaaaaatgaataaaaacacaataaagattggctcagtggtccaggatctttggctacctgctttagattgagtgacattcttgtgactcacactcttgttataaccattgcacccttcccctgcagaaatgttgtgacctccaagtagaactttgtaccccttaagcagcagttctttattccctccctccctctctcttcctttctctctctttctgacaggatctcgtatgtcatcctggttggcttggaaatcattgtgtaggtcaggctagcttagagctcacagggatctaagagcctttgccccctgagtgatgggggtaacgtgtatcaccatgcccagctcctcaggcagctgatgcctgtctttctcagtggatctaaccattccagtcccacagtgggataacgtatttgatttagccctcttcctcttcctcttcctcttcctctttgtcttcgtcttcctcttcgtcttctcttcctccttttcctccttccatttccttcctcttcctcttcctcttcttctaatccactcagtgtcatgttcatgttgtagtgtgtgtcagaatttccttccattgtatgtctgtattggacatccatcagtggatacttgggctgctgcttagatttatttagtgattgtgggtagctatttcttcccctaatttctttacatgtaaaggaatggacattagtctctcaggtagtgagaagagcagggctagaagcctccatccccacctactttgaactccttaactgtccttcctggtcctgcctccgcctggccttgggtcaggtgggtcagtcctgggcagggggacaagagcgtcctgctctatctgatgactcacctggccttcatgaagggaggtcctgcagtgagccagacactggcttatactagtctctttaccagcttggtggccagcacagctgggagctatagataaccctgagctcacagcagtgtgtgtggggctggtccccagggatactgactcagacctcttgccctggctgtgctcctctgggcctctcatcttccctgaggaacctgttgtaccctatcctcacctctagtcagtttcagctgccagcacccccaagagccctgtctttacacttcctgcatgcagagatcatttcccaagtggaccagtcagtgggcccacagtcagctgacagcagatcctagagttggggccatggccttagtgttttgactacagggattaggcctgttaccagctcaggccaccgtacaccagagccaggcagccatgcggatgacatgcagagccgcagcacagcttaacacctgttatttctgagccgaggcacccatgcttgttggctttggtctccaaactgaacgcctctcgtttctccagtacgagctctcatgcctggggtgccaacctcctgctcatggctccgttcacttttgccctttcactgtgtgactctcagtctgtaattgagcattctattctgacatcctattctgatttcctttggctagcctggcctcaggtccctgggaatggaggtagggaggaaagaggtacttcttcactcttgcctgcatctgtcctttcccctcttcctccccttagcagctgcattgagggatgccttcctcctcctcttcttcctcctccttttcctccctgaggctggctccttaatcttttgcatctgttcttcctggtcccagccttcacctaccatacctggaggcagctcttgtatggctgagtctttctgcccctggtttcattccccgtgtctttgattcctctgctatgcccctggcttgccattaggctagtcttatgaagcatcatctctccttgaatctagctggagtaggggttggggaatttctgttcttcgtgactccatggctagtgagagaggcaggagaaataccttttgtaagggaaccacccagacaggcatgtagtagggtggagccaggaaaccagagggctgggttgtcttggacctttctggaaggaagagggtccccatctggtggtggtggtgggacaaatgtgctctagacaaaggagctagagtctggcactgtctcataggtaggacttgacaccgtagctttgagagcccagtaaagcatctagacaaagcattaccaggaaaaggttagaaatgagcaacacactattaaaagctcccttttcagcctagacttgggcagcctaagctggagtcttgttgaatttttttttttttttcttttactgtggggatggagtaaaaagtgggagactggcctgagtttcctcctctgtctgccccacctcccccatattaattgttccttactggttctgacttcctttggctagcctggccttggcattgctcctaggtgtcctagagtgttttccgttgctgaggtaaaacaacttaggaaagggtttatttgacttccaggtcacagtccactatcaagggaagccacaccaaggcagaaggaacctgaaggcaggcactgaagcagacatcatgggaaaatgctgcttactgccttgttcctcatggttttctcagcctgcttctttttttctttttcttttttggtttggttttgttctgtctgtttattttggggggagtggggtggaagagacaggtcttactttttgacaccgactgtcctagaactcactatgtagaccagactggcctccaaccctcagagatccacctgcctctgcagcagactcatcctgcttttttatataccatgagtgatggtgttgcccccagcacaggccagtatgatgaagtatttctttttcagttgtggctccattttcccaggtgacccttgttgtgtcaggctgacaggtgcttgggtgtttgcttgttgcttctttgtgttttgtgtttccagctcttacactgttctcgtaggctgtcacctctctcctgcttctggaggcccatggaagcccaagtctcttccactcacgctaccttgatggcagatgagatctagagcaagacttaaccttgctgaacattgcttttcttctctgtaggatattcatgactacctttgagaaaggtgttttgatttcttttatttcatggtaggatacagatgctaagctgtttttttgtttgtttgttgttctttgtttgtttgtttttattttgagacagggtttctctgtgttcccctggatgtcctggaactcactttgtagaccaggctgtcctcgaactcagaaatctgcctgcctctgcctcccaagtgctgggattaaaggtgtgtgccaccactgcccggctgtttgtataaacagtgttcggtggcattaaatatattcagttttccctttaaattttataatctttaagaagaatcattattttggagccgagtgtggtggtgcatgcctttaatcccagcactccggaggcagaggcagaggcaggcaggtttctgagttcgaggccatcctggtctacaaagtgagttccaggacagccagggctatacagagaaaccctgtctcgaaaaacaaaaacaaaaacaaaaaaacaaaccaaaacaacaaaaaaaaagcatcatgattttggggctcagtgggtaagagtgctttctatacacgcacaagaacctgagttcaaattccaagcatctatgtaaaaacccagaaaagcctgatgggcagagacaggaggatcattggagcttgccgccagcctatctccgtgttcattgagaaaccccgtctccagggagtaaggtagcgggtgacagagcaggacatctgatattcttgtctcgcctctgtgtgtggatgttcacaccacatgtacacacacattattattttaaatttactctattgatttgctttgtgcatgtgtgtgggtgctcatttgctgaggtatggtatatgaaggtcaaaggatagcttctgggagttggttctctcttcctaccacgtgggtcccggggatcagactcagttcatcaggctggaggcaggcatctgtctcaccagcccccaagttattattttatgctgaggatggaacgcagagtcttgtgtatgcttgccaaaccctctagcacaagccccaaccccagcctgatacattcacatcgttgtgcagccgctgttaccacccctttctagaactttccatcaccctcaaatggaaattgtacccatcaatcaataacttctcattcttttgggctcccatccatgagcacagcatctctctcacgttctgtctctgcggcttggcctgttctaggtgcctcagaaaagtagaattgtgcaaaggttacttcaatgtttgagagggttttgtttttatatggagggtagaagccagggctttgcccataggaaacacaggacctaccagtgagctacagcgcaggcccagacatctggcttaatagcccgtccatcatcagcaaatggacttttgtgttgtctgtgtccttgcagttttgacactgctggtgagcattagtgtgtcagggtctgagccctgctttgtaattcttatgggaatccaggagaggaaggaacggttggctctgatggtgattttatgtttaacatcaaaaacagtgtttagctgagcttggtggcacaagcctttagtccctgcactcagacagaggcaggtggatccctacctttgaggatggagatcagcctaatctacatatggatttctaggatagcttaagcctacataataagaactttttatcaaaacaaccaaccaaccaaccaaccaaccaaactacaatgtgtgctgttactctccttcttttcctgttgctgtgataaaagactctgtcagaagcacattagcaagagagagtttacttggctgaaagttcagagttacagtccactgtgcagggttgtgactgcaggaacttgagggagctggtgacatcatgttcactactagtaggtagacaatggtgaatttttaaataatagaaaaataaatttatttattctatttatatgtgtgtattttaatttttaatttttatttatttatttttttctgtactatgggcatgcttggtgcctcagaggcccgaagagggtattgggactcctgggactccagttctcggtggtcctgagccaacatgtagatgctggtgattgcatcttcattatctggaagagcaagtcatctctgggccagagaatgatgtttgttgagttttatcccccccacccccattcttttatatattctttatatattttttattctttatatatttttatattctttttccagacaggttttttgttttttgttttgttttggtatgtgtgtattcttgtctgtcctagatctcactctgtagatgaggttggtctctaattcagagatctgcctgcctctgcctcaggaatgctaggattaaaggggttggaggtggggtgggagtgtgtgtgtggctggggcttgggggtgggggctcatgtgtgtgtgtgtgtgtgtgtgtgtgtgtgtgtgtgtgtgtgtgcgcacgcgcgcatgtgtgtttgtgactggggtttgagggtgaggggtcatgcatgtgtatggggaggtgttcatgtcatggcactaacatggaagccagaggacagcttgcagctccaacaggttgctggttctctttctctactgtgtgagtcccaagaatggagcctagggtatcagtgtaggtagctacccttacccactatctcagatgctccaggatagatgaattctgtgcccagctctcctcctctcctcatccagctccaggaatggagctgcctccttttggagcctaacctgagtaattgctctcgggtgcgcctggtgccgcatctcctagtgattctagatcaacctgaccgcccgtcacaggttccagttcttccacacgcttgtgagccttgctatttccccttttctatttgtagccatccgagtaggtgtgagttagtgtcctgtgatagtgatgctcagtgatgctgaggtgcccggggtgatggacaccccctccctcacagttatgagaggtccaatgcagggaagacatagacctgagagcacaaggagactccatgtttagtggggactgtgacacagagctcaaccaaggaactagaaggctcaagccatcacctggggagtggaggtgggaacaggccacacccacacagtcagggagagctcttggggatgccagccaacagaaatttcaccttctggtcttggagcctgttcaggggtgatggtggtggcagctcagttaagtcccattgctctggtcacttctccacaagcaagctcctccccatagcccacagcatcagtggatcttggaccgagaggcgctcctgctatccaggttagagagcatagcttctccttcctggaccctgggtcataagagggattgataacagagtgtagagaaggggatgcctctggagagaggttcttagaccatttcagtttttaaagcccattgcatttattaacaaggccttgtaaatagcagggcctggcagtctgaggaagatggctgactgtcctggccttgggctaaacagcctgtcttttacttcctcaatgctgtttttatggcgtagcgggaaggctgatgtggcatggacactgctctgcctgttagctggtggctttgtgggaagcaaagaggtcatgagatgaccaagctgatttctcatcagagatccctaccctcagtcggtggccaggccgaggcactcccttctccttgggcagtccttcccatggtgggccacgtatctgagctatgtgtgttagctgttggacacatgttctctgacagatgggtctaccatctgtctggtagggatgtccttcccagcccctcccaggtcctctctagggtgggccaaggccacctgccacattgcaatctccagctgctcaggatctccccaaaggccagggtggcttcctgcttccttggcttctgagctcaattgctgaggggtgaggcctgccattatacagccagtggcaaggctgggatggcaacacatgtcttcttccttctctctgagttatctgggctttctatcctgtccccccttcttcccacctcttcccccctttttttctctcttttggtggaaggtatttttgagacataccgctatatagctcaggctagccttgaactcactctgtagttcaggcaggctcccaactaaaaatccccctgcctcagtgctcaggtggtgggtgtgccccaccactcctggggttcctgcaggtttcttcttgccaaggctccttgacaggctttggcatctctctcttcaggaccacattcctgcctgccccttactcttcctcatccatcaaatgttttcctgagctcaagatgccactgtctacaagggttgagactatggcgcatccttgggtggtcttgggggatggaggtcttatctgtgctgacactcaggagacctcgatgatccaccaaaagttggggaacagagtggatccttgcgaaggaaaatctactgcccctggggagaaggcttccacaagaaagaccagcctttgtgtcaccatggtgatgaatagtcaccatcctagaaaccaatcttaatagtgcccgggccactaacaagccatgtggccatgactgaagcgtttctccatcctgggcttcatttccttctttggcttagtctgtgggagcacctgcttctaggagacatgaccaggttcagtcacagttacaccatgtgtttgttaaatggcctccttgtgggcatggtggtacagatctttagtcctcccactcagaaggcagaggtgggtggatctctgtgagttcgagactaacctgtttatgtagactacgtacattgcattgtgaattccaggcctgccacattatacagcaaaatcctgtctcaaaataaacaaaacacacatcaacaaacaaacaacctaagacaaaggccacagaggaatcagcaacccttagctgtggaatttaaaatggcagctcacaggagagaagggagaatttggccagccaggaaatgtgaagatggtggcctgaggtttaaaggtgccattgtgcacctcaaaattgctgagggtttgttttttgtttttgtttgtttgttttttagatttttgaattactgtcttgtttgtttgcttatttgtttttcttcttttctttcctcctcttcctcctcctcccctttttttcaagactagctctgtagaccagggcaaccttgaactcacagcgatctgctaacctctgactcacaagtcctgggattaaagggtataccaccattgcccagttagggtcttgttttacagccctgactggcctggaaatttattatgtagtctagtctggtctttaaactcaaagtgatcctcctagctctctcttgagtgacataattacacacctggttgcatttaaaaaaatatttgggtggcaacatatttgtcatgccagcacttgggaggctgaggcagagaaggcagcggtggctttttgtactgagtgctcctcaggcttggggaagggtgtccgacagcttgtattgtggcctatcctgtaagaggcattgctgagcatcctcactgggtctggctcagtgccgaaagcaagtgacctgggcagtcatctctcctagatctgttgatggatgtttcgagtgagagtttttccagcttgttttgatatgtaacaaataggcagagtgacgtgactgttgttaggagagacgggcttactctgagtttacgagctgacactacaggagtcactgtttgcaggcgtacccaccaaacccctgaacttaattccttatagttcaggctggcctggctgtgtacctgaaggtgacttttcaaaggaagtttgaacttcaatttaaaaagagatttaattaattaattaatttatttatttacttgcattggtgttctgcctccatgtatatctatgtaaagatgtcagatcccctggaactaaaattacaggcgggtactgggatttggactctgtccctttgttaagcagttagtgctcttaaccacaaaaccatgtctccagcccctaatttatttatttattttttaaagtacatttattcatttgtgtggatatttgtggatgggtgtgggcatgccaccatgtgcatactgaggtcagaggacaaccccctcccaccatgtgggtcctgggaatcgaactcaggtcttcagtctttatagctagaacctttatctgctaattactctattgattggctggttggttggtaggtaggttgatgtgtgagtatatgctatgtttgattggttgggtggttggtcgatgtgtgtgtacatgctataacatgtatgtggaaatcagaggacaaggacagagttggttttctccttccacctttacaagggttccagtgatcgcactctggttgtgaggctgtggggcaaacactttacctgctcagccacctggagatcctggtaatcttgaatttctgatcgatcctatggcctccacctccaaagtgttacaactataggcgtgtacctgggttatgcagtgctgaggctcggggctgaactctgggcttcctgtatgattgtcaagtactttactccctaaccctccagggaggtttctgggtatctgatatagaccaataataaacaccccattctcagcgtgcacttctggggggaggggcagcgctcagagtatcaggagattacgtggtgctcggagcacactgagggtgacaatgagtgaggctgaggtgtgctggtggggatggagatcctcgccctcggatcacccaccgtcagggaatatgtcacaagaccatggcagccatctccacccaggccacaaggccattccagacacttccaggaacatgaaggtgaggttccctgcaagcacaaatcctattgggcaagaggacccagaacattccaggaagcagctcagagtggcaggtagatgacatccagagaggtggctgagctggatatgagggtggacaaaccctttgggtgcttcactggaaggacttgaacgtttcctctgtgtgtgtgtgtgtgtgtgtttcaggttccttgtgtatactaggtaagagctttactgctgtgcccagcactctgtacccttcccccaccccctcttgtattgcttaagctgaggaccagcccctggcagaaacaatcctcttgcctctcagcctcccaagttgctgaaactctgatactgctacgacatctggcagaccttggcctcttcatctgagaaagatgggaagccagggcagcaccttttggattttagtagagatgccagctgctgggctgagaatagtctgaagcaggaagccaggtggagcgattaataacccaggccagtatcagtctgtgagaggtctacatgctaatatagtacctagatgggcccgccttaggtgcccgatattgttggtctgcatttcttccttgccactgggatgctggaccgccggcatgtcactcagggaaggtgaaacacaggggcaacaggctgcatgtgtgccttgtcgctgggaactggagcactgtggaaatgttgctcaaggaagaagaacacagtctaggatagggggacagcaggaactgggacagatgttgtggttctcagtctcctgtgtacccacacactgccagcaactttgaggagttgagaatggttgtcctcacaggcccacgctgagcccttgacatgatgtaggtggaatctggcttagttccaagtatcaactatagggaggggctggatgcccaggaaaggaagctcattggctaaacactctgctggtctcttagcagagtgtcttggtcacatgtttcaggacaggtagtctgaggtagtctggctgggagctgattctaacacctaccattctcaataatgagatttaccggggttttcgaaactgctttgacctgccagcttttctgtttggtgacatggttggttccacttgccccacaggccacagcatggtagcttggaccacagaactgaggtggggagaaggggtctaattttgggaatattttgaaagcagaatggtgacagactcagtcattccttcatccatgtgttgattccattcatctggttccaaacactggcgatattaacttgttttgaaacatggtctcattatgtagcccaggctggcctgtaatttctgacactcctgctgtccgtttcccaagtactgggtcacaagcatggaccccgactgctaactttggaggtacagactggagtaagaacagactgaatcgtgtgcacattcttttcctctgggatactaagaacctaaacagatgcagataattgataagctgccaaggcaagaaagaaccagaggagcagcccaagaccgatttcccagacatccctaaggttcgcagcatcccctgctgggttggctagttttatgctaatttgtcacaagctagtcatcagtgaggagggagccccccttgagaaagtgtcttgttaagatggactgtaggcaagcctggagggcattttcttaattagtgattgatgtgaggcccagcctgttgtgggtaaggccacccctgggctggtcccaggttctataagaaagcaagctaagcaagccacgggagcagtccactaagcagcatccctcccaggtttctgctctgcttaacttcctgtcctgacttccttttatgatgaactgcgatgtggaagtgtaagccaaataaatcttttcctccccacattgctttggccatggtgtttcatcacggcaatagttaccctgactaagcctcctgccttccctttcaatccagctgtcccgccaccaacactcagactcgctctcgtgtctccagccttggattggcctgtggttctcagaaacttcttctctgtcattcctaacttattcctggcctttctctctgaattctgatagattctttaagctaagagtgtattctccttcccaagagactgactgagcagcaggcttctcatcctgtctttaaaaaaaaaaaaaaaaaaaaagaaggactgggtttaccctctagcccaggctggactcaaactagaagcagtcttccctgcttggactcctaagtgcctccataatagataaggaccgccatgcctggcctgagttctcacagaaccagtgttaagccgggcagtggtggcgcacgcctttaatcccagcacttgggaggcagaggcaggaggatttctgggttcgaggccagcctggtctacaaagtgagttccaggacagccagggctatacagagaaaccctgtctcgaaaaaaaaaaaaaaacaaaaaacaaaacaaaaacaaaacaaaaaacaaaaacaaaaacaaaacaacaacaacaaaaagcttagcatcctaagtcagtaaaaatgtgtgcgatcaaatatagaagaaagacgttagaagaactagatcgagctagattcgaaggcagagtggagatccacttccaccagctggctgtgctcccaaagctccttggtagaactggaagtccaagcccagctctctaaactctaatgttgtggtcgctttcccattaccaaccgctgaaggctcaggctttgtagctgcagcacagtcacctttagttagacacacagtaaaactgctgggcattcattgccctgccagcagcacctatggactatgtcctcctccaaagctttggaggagacatctttcaggactcatgtttttaggtgcagactgtctcacacagtacctgaggagcctggttcctccttttgccttcctccctcagacacagacaggccagcgcactcaaggccagcacatctttctgtcagttgaaggctcttaatttggacttggctgtggagaaaggtcagcttgggggccagcctggctctggccaagctctctagttacagcctagggctcgcctcacctgcccctgtaatagcagcttcctcacatggccactccagcctcagctgacagggcaggcctctgctatgccccctggcctacaagtcaagcacagaggtgacagcttcccctacctcagccctccctctccctctccctcatctgatgtttacacagaggttgacatcccacctgggcccacctgcttcccaaacctgaactccccccccccttctcaaacatatctgctccatgcggatatgtgtccctctaacctagatactgacttctgtttatcggacagagggaggaggatcaaggatggacacacggtctgagccagccagggctagatagcaattccttttttctcgaaaagcaaacacacacacatacagcaaaatatcaactatgaaacgtggctgaggatgtagcgtaggtaacagtgtttgcctagcatgtacagtgctaggcttggtctccagcactgaatcaggacctggcatggtggcacatgactattaatatagcccttgggatatggaagcaagaggatcaggagttcaaagtcactctcagctacgtaatgagttcagagtcggcctaggaactaataatagtaacaataattaaaaacccaatacatcctctttgatcttatttatagtaatagaagatgtggctggcttggggacatagtatggcctccaggtgatagtgaggcagagccttgagctacaaaagtagcctgggttttggttttggttttggctttggtgagattgagaatagaggccttttgcctgttaaacagatcttctagcacggagctatttctcctggctgccctaactggatgaagaggcaggcctcctccctggaaactattagagtcccaggaccacaccttctatcttccccattgcccaccaaccatctttaaggacctcctcatttccagaggcagcagaaactatgagagcctcacaggcaagggccaggtatttcccacacagaaagccctgggaaggaccaaggtgttgaagcagccactgtggaatgaggagtttgggctgagtggtagtggcccacgtgtcctgattccactactgtcaccagtctgtctggtaacgatgtagtctcttctcactaatgggatatccctgtgttccaaggcaggcagggggagcttacacagtccttactctaagtctccacccaaggtgggcagagtaagcagcccaccttcatgctttccccactgagaggttgtggtgtttctacaggtcggaatgagctgatcgcacgccatatcaagctcaggacagggaagacgcgcacaaggaagcaggtgagcctggagaggtctccccaaggggattggagaggcacccacttctctgggtgccctggttcttccatttaccagcgagtcaaactcccactctgggatactacgggaaaaataaatccgtcccccccaccccccccagcttatgaagtactgccagactcaaggtgaactgggcaggcaggagggagctccccacattgacctgctcctcacacagtacattcacagtgtagccagagagccatggagggctaagggttggggacacacaagctgtctgggaggtggagacaggaagtctctctttctgcaacaggtctccagccacatccaggtgcttgcccgtcgaaaagcccgggagatccaggccaaactcaaggtaaggaaaaccgtcagcagagagagaaccctgggacttgtggggtgaagtggggcttcccagaagtcaccgctctttttccagttaggaaagtcagcgctgtgggtccaggggcttccattgtgttgagcctgtgttgtgtgcttcttgctgttaaggacagttgaggcctagcctgtggcatctgccatgtgtgtgggtggcagtctcctgctgggccctacctgggatttagtgtagcagggccagactcagcatttctgtcccccgacccctgtgttctctgagatgagccacctcacctcatctcttccctcgacgggccacctcagaaagacagtcagtccttcaggactctggacccatgccctttgggtgagcactaagagagggtgagccttctaacagggagaccctccctcatccctcccccctccccaagggtttctctgtgtattcttggctttcttggaactcactctgtagaccaggctagccttgaactcacagagatccacctgtctctgcctcccgattgctgagattaaaggaatgcaacacagccacctctaatcccatcacctcctatctgactggggcccagattcaaatccgtagaaccacggacctctctgcctcctgagaagctacactcattgtcctcacgcttccgttcctatcctctgcccagctgtctgacataccccagagctgtggctcagcacctccatcctttgtccccaggacagctggcctgcctgcagctgtggatccctccctggaacacttccagccctaaagccctgcttgttctccacgtactctctctggtctgcttctgacatactgggagcccaggtgacagcagaggacagaatagctgtgttatgtttagagtgtctaagggaatgtccaattccttgggatctctctaccatgcatccttgcttcaagaaatcttgtatctgtttataaattgagactcgaaggcagcggtcattggtccctagtcagtcatcaagaggagccacaaacctcttaaaatgccgaaattatcatgcatctccatcttccccagtgactggcctgggaactatgtcctactttcaaggctcctgggaccatagttattaagttccggggtggacagtagggtaggtgggaatccttgggcttggttctgtccatcttcatatccttcatgagccctgtttagtttcctcatctacaaaatatccggatgatgtggcacagtcattggtaatgtccccttcaactggaaaatgcaagactcttggctttgctgtctggccattgatgtcatccttatgctgtcctttccatttccttctgcctcttgcctcatgcactgaggatgtggtttctcgagccctgtcatttgtttagattaaggatacaggaagggacacatgttgccggcatggaacggatggagctctctgggcttggggtacagttgtaaatctcagtagcccttaggatatggcatgtcaagtcacctcagagagaggcctgggagagctggcctaggatgtcttcttctcccagaaggacatgacatcagttatcagaggcgacctttaagaacaaggctaaagtttatccacagaaggacagtagttgaggatgccagcaacaaatttcacccattcccttctttcacaagcaagcacatagtggagaacaagtaagcacatagtgtgacttccatgtgctctatagggagtgctggctgccgatacatcctaacacatttccactgtccccttggctggcactgccttctgagccagcttgcagtgtctcagtcatttttctgagacaataaaaaaagtctcagtctgggtaattataaagcataaatatggatatgattgtgtatgcctatagtcttatcagcaggctgacacagaaagctcttgcaagcccaggcatttgagaacagctaaaataggcagactgtcttttaaagaagaggagaactgggcatgatggtccacatgtgttaattgggaggctaaaagaggaggacccgagttcaagatgaacatgggcactctagtgagaccctatctcaaagttttaaacaaaaaggggctggtggtagagtatagattgcttctgtagtgtaaggccctgaatccaagcccctgcatcatgaaaagaaaatggcttgggaccgtggatatggctactgcagggttgagtggttgcctagcttgtgcaagaccctaggcccaaactctagcacaaaaagaagaagagagaaaggcttaaagattatggccctggagagttgggcagtggttaagagcacttgttgctcttacggggacctgggttcggtttccagcacctacatagcagctcacatctgtaactctaattccagtgggtctggcaccctcttctggcttccgcaggctccagtcatgtatgtatgcacttcatgtacacacattcaggcaaaatactcacattaaataaataattaatgaaaaaaagagtaatgcaatctcacaatctgagaagatggctgcagtatctattcaacatctgtggggccccttcttccagcatgaaaacacggagaagggcgtcaccacacagaaagccaactctgaccagtcggtcttcctctccttgtagaccaccaatgctgtcaagtggactcaccttcctgactttgctgaattgccttccgaaggtcccagcactaaataaccaagctgtgaacatggtggaacagttgagccccagagtggaccattcttaaggctatccctgccttctctgtgactcagttcttcataagagatactctagaccttcctccgccctcctggggtcaaagtgtactagcatttctctagatcctttgtatgctgctccaggccatacctatttccagattgctcctgggtagcttctaattgtcctgcagatttttaagctacacaggtatctgccagtctcagcttttgccttactcaaagcagacttggttctaccaaattctcattcaccgcgagatattgactcaccattgtctccatttgataaagatggtaattggagcctcaggttcaatggtagagcgcatgcttagcatgcttgaaacttggggttccatctccagcactagaaagagacagagaggagagcgagagaggcagtgtggaaaatcgggcaggcagcctggcatacatagtctctagtcaggttcttgtgtccccaacagatgaggaaactgatcagagaagccaagccacctgctcagtccccagcacattagtacttcacacttcaacctggtctgcagatctgactgccagtcctggacaacttttctgaccccaaggccagacaacgcctcccctgagcctggttggtggccctgctcaggtgctcccttcccatgtctccccaggaccaggcagctaagaacaaggccctgcagagcatggctgccatgtcgtccgcacagatcgtctcggccacagccttccacagtaaaatggctcttgcccggggccctggctacccagcaatctcaggggtaagtggggcagcccagagcaagaggccaatgcagcttttccccaacccttctcttctgcagagtagaacagtggctagcctcaattcctgttttctgagtccttccagggcccattctaaaagcatagctttgcccgtggcagaacctccgcttattctttagcagtaacacagcaggcctttggagagaggcaagaggctgctctcgtaagctgcccaatgagaattggcttaatttatagttgaggaagcagaaggatgggaaccgaatcccaaggctttgacgtcgcacaacggtgtcctcaatacccacccgccacccatcttgtctctgctcctgctctgcaccccaagagtgcccgtgccgagtggagagctgctgtctagggacaaatctgtgctcagatttcaactttgccagcctaacagccagtctctaagccatgtccgcatcgtcacacttttagaatgttccagaaatggtcctccttcccaagcttgtcctacagcctgaatagcttttcaagatgccccacttacactgtcctcacagatggggaagaaccattgaatgtcttgaatttcacatgtctttccgttatcatagtcatagagagtcttggtgttagttggaatgttaaatagatgggacataaaatgtttgtgttgacacttggattaaatcattcttttttttatgttcgagatgggaacacacctcaagagcaagctaggcacacgctctaccactgagcccctgagtagacttcttggctctgggacctcagagccatacatgctttagaggccttacattgccctgtgattcctgatgggggagagaaagtgcccaggctgggctttccccatggagcatagagaaaaacacacctaggtgtggccgctgcctgttagcattggctcgttaaacagaatcactggcttgtcttcctccactgctggaactaccttttttccacctggaggcccgcatggcctctccctcacagactctccccacgctcctctcgcgggttctggccccatgcacaacacagctgtgctgagtctatactttttttttttctctccacagttttggcaaggagctttgccaggccaacctggaacatcccacgagtgagtatggtttgccttcttacccctcacttcctgaaccgagcctggctaggggagatggggcagggggatacgggctgcatgcactgtgcgatcagcctattcagggtagctttgctctcagacatcacttacttagtctgcagtgtccacactcagagccatttacttaaatgcttgtctgtatagggtgtaggtggaactaaagcttgatacccaaaggggcatcaggttggccccagagaggatgcgaggtggattgcctcaagagatatattgcttctataactcaaacacaaagcctgggggatttggcaggggagggtgttggaaaaccaaaccagtgtcttctaaggcctaaggccaccaatggccaagctaccagagctcctccaacactctccccagagcctgatgcctcctctctcctttctcctgcagtgtgaaacctttctctcaaaacacctaccctgtccagcctccgctgcctctgccaggtaggtgggtggtgcatgatccctggatgtgtcacaccctctgcctcctgcctcaggtccctgctcttaccactgcgagatgtcatgctgcagccatgcctcatgggtccctcatggcattctggggtgacaccaaatgctgtacttgtgctcagggctggctggattggattgacacagaatggaaggaagcacttttgtgcccaggttgcccttgtagggtacatgtgctgctggctcttcaggctttcccctcggagtgctaccatagcttctcggttgggagctgagaggcactggtttccaagtacaggagaccctgatgcctgctgggcattgatacctaagcagttgctggtttggtccctcccccaggcttcagttctgaccttctctcagggggctcccttagctctttccacactgcagtccaggccagggttttgaaccttcttcgggagagaccagccataccattctggttgtggcccctcaggctttcctggcagccctggtgcctgctcactgcttccttcatccccatacagagcctctctgagttgggtccagacctcatgtccctgtcctcttttctgttctcttccctctgtccatgctgatgcggtctgcactcagatccacccaattcttgcctggaatactgcagtctcctcttcactggctccctgtgattcccaaagctatgcttctctggccatgctattcccagcctttaagatgcttctaggcagcgtggttcctgttggtgagctctgagctctgcagtggatctgcctgactcctgagcctcagcctcctgtgctccctgctcggcctctgggctgtggccgctgctcctgggccatggatcctctcacctgcccccacccaggttaggtgcccactgtttgcccacccagggctctgcagacctctgtctagccgaggtagtcttctttgccgttcctgtttgttctaggccagctgtatctgcgtatccttgtgggtcctcacactctgcacaccttcctgggtgccctggggctaaaggaaggaaggaaaggatcaatggatgccctcagcatgggctggtgtgttcagcatggctggcttctctcctggactgttctttcttggtctcctctgccttttgtttaccctgggctaagtccacggcttctgtccaggatgctagaggccacgaggctcacagaagaaaaatctggatcctgaagaccttgcctctaccctgtctccctctgtcccatcccttttccacaaggaagaaggaatgaaaaactgcccagctcagcagcagggagcttgcctagattgctatctgcatcagaaccacagctcccatcttaaatggaataagggatagtttactctggagccattaggattgagcatggcctgggaacacggatttaggctaccccaaactccatgtcccaacgtggaaatggactcacacatgaatcaagacaactttaaaatacactggtggctacaccagagaggcaggcacaatgagatacagggagctattctacaggtctaagatgctctgtgctgacgcccttggcttttagagtggcagaaactagtgttctgctaagttaacagctttgagaggtggctatttattgccacgtggtattagttcagatacagagtgaggtaaggaatgcctgttccagaagactacaactagcttaaataaagtaattagcctctgaaataaattcccgatcttcctacagtactgacattccaattggcccatcagtctctgtagacgcagaaactccttccaggagtgttttgttcccagccagacacagctgcttttcaggattttttttttttttttttttttttttttgggttcacagtgcttgctccaggcaggcttccatccctagtattaccaggaaaaaaaaatgtgaagctgaccatttctcagcccagcttagctcatccagtggccttccttgacttgggaatgaaatccaccctgtttgccagcatcctggctctctacagagccttgtttcccactaccaatccagaaaggtcttccttaaagcttggctttccagattcagtcagctggttcccagcccccacacatttgctttggctggtccccagtttggagcaccccccaccccatctagactctcctccttcctccctcccctctccctctttcagctctgtagagcagcctagcctggaactcacagcattctgcctgcctctgcctcctgagtgctgggatcaaaggtatgccccaccactgtcctgcttcttaatgccttctttaagcctcaccttcctgattggcctcaaaggcaccaagaagtcttctgtggtgctgggggccctcccacctcatcaacactagcctaggtctgtgttcactccttagaaaccgttgtcataattggtattctatgggtttgaggcaactgtgagccctccaggaaacttcctacttccagggcctctgaattagtgtgctgtttggttcacctggctatcttcctacctggactagaaattaccctagggcaagaatccagcagtgcctgccctagttgctttccaggcaacctgggctgctgagaatccatctgcattgatcatcggcctgtgcagaagcttgggaccactgagctagatggggcacagggtctgccctgccacggcacatgttcactggttctgtcatgttcttactgaggataggaacagggaggacaaggagggccaggttccatgtgtctctctcccttcatgtaggctttgagtctcctgcagggcccaccccctcaccctccgcaccgctcgctcctccgtggcaaggccgcagcatagctagctccaagctctggatgttggagttctcggctttcctggagcgccagcaagatcccgacacagtaagtccctcaaactccaagagaggccatcttaatctcagaggttctgctgccattgtagggccccagtcttgcaggcccagagtaagtcaccaatcccacaggccttgtccctaaagaaagtcctcgaatcctgcagcttctgtctccatgctatatgccactgtcagtggaggccctagccacatagtaggtcccctaatacccacactattaaatgggttctcaaccctggaagtcctgcccccatagaagacctcaccttccatccttcctgccttttctggcttccttccctttcttccccttctccctcagatcttaatagattactcgttctttcttctcccctcaactgtcttatatgtcatcactctctcctcccttccccttcttttactctgttctttcccttgctttgtgtctatctcccacctcaagccttcctggctttgttctccctttctgttctctcaggctgtctcttatttctcttcttcttctagtgtcctttcctcctaaccctgctccccccaccccgtcccccactccttagctctgaggggctatcaggaagctagggtgactctagtggggaatccatctcatctgagacaatagcagggtacagcaacaggttactcctgaccttgctcatctagagttttactgctgtggacagatgccatgaccaaggcaactcttataaggatgacatttaattggggcccactcttttggctagagaaaattctcaatcagacaatctcagacggattgttcttttgtccacagtacaacaaacacctgtttgtgcacatcagccagtcaagcccaagctacagtgacccctacctcgaaactgtggacatccgccaaatctatgacaagttcccagagaagaagggaggcctcaaggagctatttgaacgggggccctctaatgccttcttccttgtgaagttctgggtaagccctgggcctctcttcccttcattcagtgccttgagatggtgaggaaagctggaaagagaaggcacagtggtgtgtaggagaaaaagggggtggggtggggcgtcaggggggaacacacacaggaggccactctccgcttgtggaagctgggtgtcagattctgatagtgaggccatagagctgtgcagacaaaaggcttttggcttttgtttcctttctttctctctcctttcctcgttccgtttctttctatgccggggatggacagctaactgggatagataactaaggtatgtttcccaaatcctgcatgagctcaagagactctttttggatggtggctgtggcaagatcctggccaggaattggggggtttaaggaggcagtagtcctggggaaagactgagaggtaggtaacacagggctaggaggagagtctgcatggttggttctgggcctgatgctggtccccacctggttctccggggctcatctgtgaatcttaactgggctcggcagagctgggaaaagaggagaatggcttaggatgtctcttagtgcagccccgcctcccataaggaaatactcatgtctgtctcaagcagtcctgtccacaggcctggcctctgccgctctcctcgtccctctgtggatgctgggtacatagagtcagttcataagatgctctactctgagatcaggagttacagaactgcccacagctttcttccagggcctacaacacacagaagggacatgggggacaccagggcaatggctagtaagggcaggaagtcctccaggcacctgactgaacttcagatatggaatttttttcttacaccaggcctgggatccagtgctgactctccctgctccctgtggtctctgccacagaggaccacccagatgctctccttagatctatggagtgcactctatttagttgctcgctttgttgttgttgttgttgttttttggaaccgtggttggaggcctggatgtcagccttggtagacaagtgttctacctttgagctgcaccacagccctgccagctggctcctctttctatctacttccaccccagtctaatttgctcccgagcctgttggtaaactgggagtctctcgtcttggaaagaacatgttgacagtgaaggtggatacaatatcccaggtggcttttagtccctgcctaggaatgcccagcccagcccagctcagcccttcctactgctgagccagcacctggctctcaacagaagactacagtgctgtgttagagacccggggtcttacctagatagacagtgtgccatttttgccctgtgattgcaggaatagctggttctccaagcaggttggtgcctggatttggatctgaggtcggcaggatctgctaggcagagaggaggaaggccatttcttccctagcaatggatgaagagaaacaggagaaaggagcagggaggtctgaagaaaggtacctgagacagagtaatagaaaacagagcagctgggcagtggtggcgcacgcctttaatcccagcacttgggaggcagaagcaggcaggtttctgagttggaggccagcctggtctacagagtgagttccaggacaaccagggctacacagagaaaccctgtctagaaaaaaaaaaaaaaaaggaagaagaaaaaaatagagcagctaaggtgatggttctagatggtccttaatttaaattctagggcttaattaatatggatgagaaatatgcagtgtgtgtgtgtgtgtgttggtgatcaactcagggctttatatataaagcgcttgctctactgttgtgctacatagcattccactgatcttagacaagtgtgtttatagttatgaattccaaaagtctttaataagtaaggaaaagcttttgattcttgtactgattccttcctaagacctggagggttaaattgtgatctttctttaagttttatatcctatgttagtaaacatttatgtcactttatcttggtgtcatgactaaggcattctagatttatctcattatagaataaaaacccgcttcacatccctttccattacctgagactactcccatggagcgagtcctatatccttgagcaaaagccacacaatgtttgcaaagagctgaaggctatgctgtgactacgtttcctctcttacgtgccttttctttctcctataagtaaatggatgtggtttttttgtaaactggggatttaaaatgaagttattcttaaaattttatagatggccccatgagagccaccctataaaactgactcagcttcctgggttctgggattacaagtgtccaccacatcatgtagcgtatagcagccatttgtaaacacactgctctgctgccgtgtgatgcctgtcttgtcttgtgatgtgtgtgcctggtgccgttctgattcactctacatagggaattttatgatctgcttttctcctttctgaaagttttaatatcgcctcgatttctgtgttttcaatttcatattgatgatctttgggttatatcttgtctttcttcccatcgttagctctaaacttggtaggcatctttaatgataagattagagtcttcccatttccggacatttaagtgtgtcatttctttgaaaatttctctccttcattttgccaaatccctaatgctaccccagtccctggcttatgctctttgttttttttttctttttcgggaggtagtaggggagttgaaactgaatctcactgaatggtctaggctaatctgtgactcatgatacagcccaggctgtcctccaacttgtagtgatcctcctgtctcagcctcccaagtgtcaggattattggtgtgagtcatcactatgtttgtgtgttgactgtctcttgtcctggagatcactaagtaggctagaccaaagccccagggctctctcccttccccacctcccccaaccccatctgggattacaagtgtggccctgagcctggtcctttttcatggattctgagggttgaattcaagctctattcttgcaaggtaagtccctcaattactaattttttttatatattttccattttatttgcctggtttcttttcgtggagacttgcttctcttgtcgtctaacttggattggttatatctgagtgcatattatccaaagcccaaggcatcatcagtgcataaagcagtagttttccattcctatagaagaagcctggtggtggagcctccagggatgagctgacttctctgtaatagcccaggagcctgagtcctctctccttgtcatcctcagtgtgtggcttctgttctcaaggtcacggacaccggaattccaaccattatctccacattgcaaacattaggaaagaatcctatatagctccctgtgggttcctttctaaagtcctacaccaggtgtaattatctgtatggctgcaccttgctctgatgaaccagggagatgtgaactcggccgctttgctgtgggtttcagttagaatcattggggtaaacaggcagcctccagtttctcatgtgtttaggggggagtcctgggctcccctccagagtgcattatgttaactagtggctttctcagcgctggtccagctgccccttgaatgtgactggggtcagaagggagacccagctgtcagtgcaagatgtggttatcagtgctataccttggaagacaaggcatatttagggtccttctcgacagctcatgccttcttttagctggtaggctggtagtttctctctctctctctctctctctctctatatatatatatatatatatatatatatacatatatatacatatatatatataaacatatatattatattaattatacacatgtgtgtatgcatatgtatgtacgtatgttctgtgtatagggattccagggccctgcctatgctaggcaatccctgtacaaagcatgccaggtaagccctatacagctgagagctacttcctggtgcagttggtggcagtagtttttatctacagacacatttcaaataaggctcatcttagaattccatctcacaaacagtagaaactgacacattgtgcagacaagggcttcagtctgaggcatgcttccttggctgggtctcttattcctgtggcctttctcagtatattcagggaagacaacagatcacaggagcactcgcgttatgaggtcacatggactctctcacttttgacttttgccacatctccaaaggtggatctgtggataatcttgtcttcagaggagaaagggaaacatgatcagagtagacaattttaccagacttaacccagtctgctgaggactagagccagacagcagacctcaccagtaaggctccaaggtcaggcaatgccccccagacacagctttggtgctcaccctggtcctgggaggaagctgtggattgtttgaaagactccaagggatgccaagggatgttgttggtaacagagacgaggtcagacttcactgagatcatgcaggggagcaatggggccatttgattttctagatcttaaccttcttcccaggaaacgttggcaaagtcttccaggtggaagtgagttagagcctccctctgttaccttgttaggcccatttcctcttttgccttcccttaggggataggggggagggaactgacagaagaagtgggtgctgggacagctcagatgccagaagtttgactgggcaggtcccacagacatgcttggatagggctgtattaaaaacccacaaggccattgccttctggcagcacaaactccatagcaagtcttggacctgggccagcgcagcacatggtggctatgagagccctcaccctgttgcaggcagctggcttttgggcttagcggttcctgtgagattaagtcactcttcctcctttctttctttttcttttctttaaactctttcctccctcccttttcccttttcttcctttctttcttagatttatttatttatcccatgtatatgagtacactgttgctctcttcagagacaccagaagagggcatcagatctcattacagatgattattacagatggttgtgagccaccatgtggttgctgggaattgaactcaggacctctggaggagcagtcagtgctcttaaccactgagccatctctccagccccagtcactcctctagagagctgcatcttaagagtaagtcttggcttctgtgcctctgtttctccttcttaaaggttagctgttattctcatggccttcaatctgggagctcagatgagatcttatcctcaacctgagtgctgcctccttaagggaaggtgagcggaggtcagagagagctggaaagtggaaaccccgtgctccataaccagttgaaaattaccaggggctgcctgtccttgtcaggggaaggcgtgccatttggcacactgggtggagccaggacaattccctgggcctttccatcatccgttccacagctcccttctgggcccgacattcctcccagacacatgacaatcaaggctgtctgctcatctgtcagtcacccgatccctcacacctgttgcaggcccagtcctggagctgcccaccctcacggaacagctatgaatagggtgcatggagggggtagtgtgttccgaaggctggccaccgagaggaacagctgtcctgggctacagctgcagggtgagctggtggtaaagtgggatggatcccggaacccaaggacaagccgaggcaccttgaaaggggtcctctggcattagccaccacctcgaagatcagcgtgacactggcccctccctatctcacggatcctactttgttctctgttacaaattctttcataatacacaaatattccgtagccttttcttgccccatagtccccagaagcactggtgttttgaaaggatcctagggtgggaggtgactgaagtgtttgcaggtctcaagtcgaggtctaggactcaggggtaaagtatatacccctatacccctatacaccatatatacatacacacacacatatacacactcatacatatacatatatatgtatatatatgcacatacatatatttatgtgcaatatacatacatatatagatatatagatatatgtacatatgtgtgtgtgtgtaatatatatgtattatactgaggtgtcttacatctgtcacagcaccgcccagagctacatgccaacctttattgaaaggcctggtgtgtggccactgagtaagatttgtagagtacaggactcttgcccccatggaccttcccctggacaagtcacatgagcatgaggtgcagagataggggcaggctgtctttgtgtgtggctggagaggctctttggtattgggtgttcccagcatggtatttggggatgtcttataagtgctacatctactgacatatcttaacaaaccaaataaaacagcaacaacaagcagagtccttgttttcatggttgtattgctgagggtaaaattacaaataaaagagagtttatgtcactaggtggtggtagcacactttttaatcccagcagaggcagaggcagaggcagaggcagaggcagaggcagaggcagaggcagaggcagaggcagaggcagaggcagaggcagaggcagaggcagaggcagaggcagaggcagaggcagaggcagaggcagatggatctctgagttcaaggccagtctggtttagagagtgagtcaggacagccaggactatacagagaagccctgtctcaaaaccaaaaagaaaaaggaaaaggaaagtaaattgatgttaaagatatcacaagggtcagcgatatggctaagtgaggaaaggtgcttgcctttaagcctgataacttgagttcaactcctagaacacacatacttgaaagagaaaattgactcatgcaattgtcctctgacttacacatgcccacagtacaacatcacacacacacacatgagtccacatacatcatcatgagcccacaagtatcatcaaaagataagaaattaggtggatacctgtaatcctactactcaggaggatgaagtcaaaggaatgagggttgaggtcagcctggactacacagcaagttcttggttcaagcaaagacaccatgagggactggtgtggttaatgagggtagcattggtcagagtcctgtgagcacatgtctgtcatctgagtattgttaccatatctctggcctcagtaacttttcagaccactgggagtcatgacagtgttttgttttcttgttgatgagtggtcagcatttctgccctgttctagtcacagcataaactaagtctctcaacgttttcaggccagtctggcatactaggtctcctgggttgctcatatgactttgagaacgtgggggagagcctgggttcaggtccctgctcacctcatttgtcaccagaagaacttgagccatggctgacccacttcctccaggactcatgggttgctctccctgccttgctccacgccctgcagctgccctttcccactggattatgatggacacggagtggggagtctgaagccatcctggggatagagagtgttcagtagaggggactgtttgtttcagaggctaaacatcagctcggatgctgcagtgattgtttgcgttttcttccttctaatgaatggctccacttaaaccatacatagtgcagagacattccaaaaaatatctcttcgtactgttccataattgctttcctccttcagcaagtttcgttcatccatagtggtgaaggctagcccttcttagcagtgtgcatgtgcctctctttgtgtgtgtataatatttctcccacactaccttaattacagcataatcaacactcccttgtcagcgtacacaaagattttgctgtagaaaggaggtgccaaaggagaaaaacttgtacttgagtgtcacctagtggtgtaagactgcttgtcacgtgcgcccaactcctacccagaccttcctgggttctgcacaagaatagtaggtctcagaacctgcctcaggattggcagtgcacagcctgcactctggtccatgtggcagttccctcggtgttgtgtggtaggtgaagaagtctcacataagagtcatccttctgggcagtactggtacacgcctttaatcccagtgctcgagaggccctcgtctacagagcaaaatccaggacagccaggggtacacagagaaactccatctcaaacaaaaaaacaaacaaccccgaatcactgttttcatgactgtattgcttagggtaaaatgaaggaaggaaagagaattggtgttgatgggcagctgtagtacacacctttaatcttggcacttaggaggcaggctggtctacgtggtgaattccagggcagccagacctacatagcaagaccttgtcttgaaaaaacaagaacaaaacaaagaattggtcttctgtatgtcatttgtagaaaaatgggtggggttagaaatcctcatgccaaacagaatcaagccaacccagccaggcaaatacatgtttttacacacacacacacacacacacacacacacacacacacacacacacacactcacacacatattcactatacacacacatacacacacacactacacacacacacacacacacacacacatattcactatacacacacatacacacacacactacacacacacacacacacacacactcacacacatattcactatacacacacatacacacacacactacacacacacacacacacacacactcacacatattcactatacacacacatacatacacacacacactacacacacacactacacacacacacacacacacacacacatgtttaaaagaacttcttaattaaaataaagaatgtcagtgagatggcttggtatacacccctgcctccaagtctattgattcacatggaggaagaagagaactgctaccccaaagttgtcctttggcttctacatgcttcctctggcgtggctgtgctcatacacataaaattaacaagcaatttttttcttaaaaagcccaccatgaagcaaaagaaaccctcccccccaaaactaaagagccgaaggggcgtccttctggaaacgtttaccaagttcagccacatgggtgcccagaggacaagtgccgtggtctgtggggacccatttatctcttgttagctgcagaacttgccgttcattatctatgtgtttgctaaaggcagaagttgcagggtcatgggttaacaccaggtttgagaaagaagcctgtggggccacacagtgcctgtaagggctggcttctctgacatgtgagggaagactaacttccagtagaagcctaaggacattgaaactgctggggatgtggggtgtctaccgaagaaagccgcaggtacccaggggagccagctcctgggagaggccgtagctgcaaatggcagagccatgggtgctgggatgcccgagctcttgcacctcagatatatcatcttaagccctggacattaggtatggagctgtagaatttcatgtttgctttgctaagtcgctacctttttcttttttgaagattttatggatatgtctctgtggatatgtgagcacatgtgctgcgggttgggggctcatggaggtcagaggagagcagaagagggcatgagctgcccactgtgggtgctgggcgctgagctgcccactgtgggtgctgggcgctgagctcaggttctctgtaagcgcagcaagttctgtgatgcactgactttccagcaccgagttccttcttgctgctctcccttgctttctcgtcgacatggggatgtctctttggctctatgctgagtgggaactgtgtggtttcccttctgatggtgtaaggtctatagctctatgtggcttcctttttgattttgcagggttcatagctcagactacctcagaagagactatactctggacacttctgactaccatgtggttgtagtaagagacggacatgagcctttctgggccaggcacgtgttttgaatctgtggctcccacagattggcatttggaatgctcagtcctcagcttgtggctctatttggaagtttatacccactcctggtttgggcttgtggcctcagcttcctgccccatgccatgtgaacagccaccgtctcatgttttagcaccagatggaatcatctgccatgcttccctgctgtgagggtctgagatggcgagataaccccctcctctcttaggctgtctgtgatagtcacagcagtcctaaagtaactaatacaataggcaaccaagaattaattcatgcgctccatgtgggcagctatgaacttatttcttgttgttttggggaacaaaccagaaagattggcaccgagccaggatgtgtgggtagcagaggctttcctatgactgccctgtaccaattttttctttctttttcttctttctttctggtccttccaggacaaaggttctctctgagttgtacccaagtcctgccccttacccccccacacacacacacttttgttgaaaagctcattcatgaaacttttattccacttacacaaactttaattcatgtgctcttaacagttgtgtttggattgttcacgaaaatttcatgacatcaaaacaaagctaggcctcatctcaagttatttccatgtgtttgtttttgttttttgtttttttttaacaacacatacatgtcaagcaagtatcaaaaaagaaaaaaatcacaaaagctaaaaagaaaaggctaaaaaagaaaaaaaaagaaaaaaaaagctaaatccttgggattttgtttacagctgtgctttgtttacagtttgtttacagcagttcatttctgctgcgtctcgacttttgcatttgttcttagattgcctaaaacatttaaatacaagtaaactatgtagcaaaaataatgaaagcaagtagcacgtaaccttacaaataatggaccatgaactgtttcttcccttagagcagactgggttacagctctgcctagggaccactggtaaagggtgtgcatgtgaagacacaggatgtcaatgtgtgtccatccactggatgtttgtaccacagcctaacaggtgccccaaaccttaaagtacccacagacaccacactccaattatgccttttgttccttaccagcacaaaacgaataggcaggcgattttctttgcttagccatggaagcagttttaacattggcccttctgaagccacaatgtaccaagaatactatgctaaacacacgtaactcctgtaaaaattccacatccccatattggccacttcaaggtaaaaatgtgtacgttcttaaagtcaaggcatgtgtagacagacagacagacagacagacagacagagtcttgtatatatctcaggatgatctagaactcagtctttctgccccaggctactctgctgtccctgccccattcttttaaagtcctgttctctggtccaagacgtgcactgggcactaggaaccctaaggacacacctgcaaacaaccccatctccccctgtctccggcaggcagacctcaataccaacatcgatgacgagggcagcgccttctatggggtctccagccagtacgagagcccggagaacatgattatcacctgctctacgaaggtctgctcatttggcaagcaagtggtggagaaagttgaggtaggagcctccctggtgggtgtagggcaaaagggtgggctgtgtgccttctcttggggccaggattgctaagggggcccctgggcagaggtggacgccatgcccctttcactgcccttaaggaagtgcatattttgggttgggcatgaggcatctggtaagttactgatttaattgcctgtcctgcacctcagagccctggctgagtcttctggctgggattcctttcaagccttccttggaagcatcccacatctagagcagggccaaagcacaggctagcccaaggatttctccctaatccatctgtgtctctgacagctgagtgcggggctaggagagaggcctttcccaggtacacagctctctagaggcagaggcaggggaggtgggtgttcagggtttgctgtttactccttgagtgctggaaacttgtggagtccctttgctccagttgttggggtttctgtaagaatctgggtgtgctaggcaagtaccctaccactgagaataccctcaatcaatccctgattcctccttctccccctctctccctccttcctttcctccttctctctccctccctctcccttcctcattcctttccttcatccttccctccctccctccttctctccctccctccctccctccctccctccctccctccctccctccctccctcccccctcccttcctcccctcctcccctccactcctccttccttgagatagtctttagatgctcctacccagaagcacagagctcacttttcaattgtggagtgccccagagaccttacacttggggcagaatttcctgcttctcttcagggcaggcagcctggtggtgagcacaagcttagaggccctgtgttgatctctgcacacctcccccacccccacttcctgttggatgtttggggttgtgttaataccccacccccatctctaaggaagtatcagtttgtctttatcatccactggttccaattgcagtgacattcccatcctattgtgtagtgacaaaatggcaccaaagcctccatcccagcatacctgtggccctaaagtctatgaccctgtctgtgcaatgactaacactgtgcatggtgttagtctggtcacctcttggcccatggggaactgaattgatgctgttctccacctgggggtgacagccacctcatgtcaaacagctaggtaccatgaaaagggaccgctgctttgcaatcccaatcctagaatggccaggaagctttcgatacgtacgtgttagcaccaccgatgctcactcatgtcactgctctccatcttgggagcgtagtccagttgtagcactgggtgtttgcaagtgtgtcgtgttttgtttgtttgctgctaaagatggatgcccgggctcactgtggctaagcatctatctgtcctgcctcggcaaaggcagtttttacaaagctcctctagctatttacttttgttaaacgtatcgaggtattgagatgcccgtggctctagccagtcatcatcccacatgccatccctctagctcctaggccaacagtatccactaccaaggttcatgcacgtggcagttccatcttgaaggcgctgctattctccccccacctcagcctcatgtgcaacaacgcctgctcacttgccctatctccttgctgctacttcggctacttccaggtctcccggaagtgtctgcctgtctggtcagtgacaaaagggagaggcggagaggcctggcttcattcatgcccatgaacctgagaggatgaccctacctgggacatccctgccgacttgggcttgggctggaggggaagggattctaagcctctgttgtccctggggttctacagacggagtatgcccgctatgagaatggccactatttgtaccgcatccaccggtcccctctctgtgagtacatgatcaactttatccacaagctgaaacacttacccgagaagtacatgatgaacagtgtgctggagaacttcaccatcctgcaggtatgatgtggggcagatgcccagcgggtggtgccgacggcagcttccgtatccagggctttgaccctcaccaccttctcgcctgcaggtggtcaccaaccgagacacacaggagaccttgctgtgtattgcatatgtcttcgaagtttcagccagcgagcatggggctcagcaccacatctaccgacttgtgaaagaatgagagacttggagagcaatggtaggggggacaagtccaggacatggggacctgggaggggaccttcagggacagtcccctggaagtgccaagagagccaagcagagttgccaggtctcttcttaccaggagcaaactgcctgatcttgcagtgctcaacccccaataaacccaaggtgtcaagtattttcagaggagctagtttggcctgtgtgagcccagaagggcaggggagaagggggcatcaggaagcaagctggaagcaatggcccaaagtactccaggacagccaaggaaccagaaccccggtggactcagccaggcatatcaccaagacaccaaagctcaagacccttctcagctgctggaacctcacactcctgctgctggtcaccctagtggcctgaggacagattgcacgtaggtcacacacccagagatgctgtgggtgactttatgtacactgtctgtctgtcctgccatcggtgcctgagaatggctactgcagaaggctccatccctgcaaacagggctgggtttaggtgtggctgcaacatagttgttggagggagactgggtaagagctactcgggtggctttgttctttctgcagtggccctgcagggggcagggtctccaaactgaagcaaggcttggaggtagggcgtcctgcctcagggccagcatttccagctgcctggcctccacaggctcctcggcttctctattagtctcttttcttctctgctcagcactgacgagggagggtgtctgtaaagtacccgggtcttgcggtgccagttaaataatctaatcctcagccccattgcttctctcactctggagggcctggatctgtctctctgctgccctctcaaggctttctggtgtctgctttccccagttggagccagttctaatagtctggagcctcaggaagaaagatacaacctgggcatgtttgtgtgtatccaggactcagggatgcatctgtgaggatgcagaaatgggcagggcagcattgtggtgatgctacagaggtgagggacaagggctctggagtcagtctagcctgactttggtgtgcaacctttaaaaaaaaaatgttgtggtgcctcagtttccccatctgtaaaatgggtataacattcacctacctcgtgtatggacagtgcctcacacagtgctgagcacatccacatgttcaataaatatgcattggtact

SEQ ID NO: 72 - DNA, 83100 bp, Pan troglodytes
  variation 8805..9103: note = n is a, c, g, or t
  variation 26151..26428: note = n is a, c, g, or t
  variation 28533..28542: note = n is a, c, g, or t
  variation 32366..32748: note = n is a, c, g, or t
  variation 65760: note = n is a, c, g, or t
  variation 65764..65769: note = n is a, c, g, or t
  variation 65771..65772: note = n is a, c, g, or t
  variation 65775..65776: note = n is a, c, g, or t
  variation 65778: note = n is a, c, g, or t
  variation 65780: note = n is a, c, g, or t
  variation 65782: note = n is a, c, g, or t
  variation 65930..67086: note = n is a, c, g, or t
  variation 71344: note = n is a, c, g, or t
  variation 72077..72364: note = n is a, c, g, or t
  source 1..83100: mol_type = genomic DNA
ctcctcccccaggtgccggtggccccgccgccactccctccggctccctccctcccgccgcggcgcgcatctcattccagccctcattccgcgcattccagcgtcctcctcgcacactcgaggccagggggcgggagggccgcagctccggcgccgccgcgtcccgccaggtgagaggcgcccgggcccgccgcacccgccggcgtcctcacgggccgcgcgccccacgccgccgcagccgaccgctcgcgccgcgtgctcggctgctcttttctttccgccgcccgcgttcccgccttggacctctgcgcttcggcgcgctccgtcccgacctctggcttccctccgcgctccggcgctgctcgctgcccctctcccgcttccctcctgtccgccccgcgctcccctcctcgctcccggttgactcacttctccaggaatagggatccccgtgttttcccgtcagtcccattctgggaaaactcctccctccgcgcgctccgctccgctccgctgggcgcaccggggccggtcggcgcggggtgggcttggccccgcggccccgccttcactgcgccgcccgtcggccccggccggagcccggctctgcgcgctgacgccctgtcgtccccgcagagcgatcgccgcggccggaagagttggcgctcggggcggactccttggaactggcttagcgcacccatcccaccttcccgcaccctgggaccggtaaggctggggcgcggggacttggtaggactttgccggagggcaggagtctgcgcggtgcgtgcggagctccctcccgggacaagactgggaagagcgaggcacgtggaggcggcgcgactgaggctggtggaggcgaagcggctccaggggcgggtaaggggggtggacactcgggactttgggggaaagggaggccggtgtggaaaggaccggagaggcagaaccgagagcatcggcaacagaagagacccagcacccatgcctcttttctgctgggcccttttcgagcctggaagggagagacctggaggtaagcggactgcctgttttaagtgcaaaggcgatgcgaaagtggggggacccctgcaaaaggtcctacacctcagggcttgggaagctgctgtgtttcttgatggggactagtggatcgatccagggagcagaactttcaaaccccaaagtgaacatttcccccgttgtgctgaggcacttgaggccccgcggactgactgcgtctgtgctgagtctgtgtgacacctgactgcgagtccccctcgctttgagtctgtgtgtgggtgatgtctgttcacgtgtggctcaccttggcttccagtgggcgtatttgtttgtgttgaacgtgagtgacagagtgtgtgtatatgtctgcgtgagaaggggctgtctgaaagtgagtatctctgagtaggtgtgtaatgccacgtctcttgagtatgtgtttctcttcgaggatgttggttctggctaggactgttcttcctccctacatagccgtgggcaacagtcagtgtctctggttgcctgagtgcagggataatttgactgtggttttggagtgtgtggcctccaggctccgtttcccctggaccgggcagagctggaaggaagctgtctccacctgcctcttggagccaggaggctgactttctcagggcgagggtcttgtgcttgcctggaataggtcaaaaagccggtaggaggctgaaggaagttgagatctttgcctttgggggatgggatgggcgagtgagatttgggaaggtttgtcggggtggatccccgggaaaaggagacagttttgaatctggagacttgtgtaaatagtgcttttaagttggccccaaggacaaacagggaggtataccagcctgaactacttttcctggtttaactctccttggagctgaccaggtaacccagtagaagaatccctcattctttccaacttgctagactctcagcacttcctttgagaagaggaatgagtagcttgttgcatgagggcttcaacgtggatatcatgtgtagggcttcttggaaggaaggagccagaaactgtctcgggggttgggggttctcgtccttgctcctccatccatcctgaggatgtggatgttcttgtgggaaacacctcaccctctcacctcttcggcctggtgtgcgactggtctaaaagcagcactgatggagtggaaagggcacaggtttggggtcaggcagaccagggtacaaatcctgagtctctcactacctttaaggctctcaggctgtttcctggtgggtaatacgagcggagcttttctgtccagaaagtttcttgtgaaaagtcgatgtctgcagagaccccacccagtagcacagtgcctggcacatcccatggactccataggatagctgttgtatccagtgtttccttcgcttatttcagtaagaacccctttttcctagggattagtgttttttgaattagtgtttatcggagcaccatttgagaaaccttgccctgtctatcatgtttatttagcaaacatgaattgagcatttactatgagccaggccctacgctgtgttccgcgtccttaggaatccagggtcctagtggcccaggtcaggggggagggggacagacagggctttgtcaccagagaacagagtgccagcttctattttctgattccagttttgccttggccccagggtaagcttgctgaacattattagataccctaatgtcagcatctaagtcccccattttattttactttattttcattttattttattttatttatttttgagacggagtctcgctctgtcgcctaggcaggagtacagtggcatgatcttggctcactgcaacctccgcctcctgggttcaagcgattctcctgcctcagcctcccggccggctagtttcatatatatatatttatttatttatttatttatttatatatatataaatatatatttatatatatatttatatatatatttttgggatggagtttcgctcttgttgcctaggctggagtgcgatggtgcgatctcggctcaccacaacctccgcctcccgggttcaagcgattctcctgcctcagcctcccaagtagctagaattataggcatgtgccaccatgccccactaattttgtatttttagtagagacggagttttccatgttggtcagactggtctccaactcccaacctcgggtgatctgcccaccttggcctcctaaagtgctgagattataggcatgagccaccactcccagccgttttttgtatttttagtagaggcgggatttcgccatgtgtgccatgctggtcttgaactcctgacctcaggtgatccgcctcggcctcccaaagtgctgggattacaggcgtgagccactgcgcctggcctaagtctcccattttttagatggggaaactgatgcccctagagggacagtcacttgcttaatgccgcaaccctggtgagtggcagagcggggattagaacctatgctctccccttggcgttctgtctcctgccctgtggattgcagtgcttgtacaccccctactccccctagccgccttcatccaataggcgcggaagctggagcagactgacgggccatgccttgtggctcagataaggttggtaggaggcagaaatactctgctccgtcctggcagaaagcacatagctgttctggggaaggagccgtctcactgtggaatctgtggagtcgggaaggggccctcgggtctttaaaacacaccctcctctccccttgatgagccggcaggtgaaggttctccctatctttttagatctcctgggttgcaaatgtcacaacctcctttgatttccactctggagtcttgccccggtgactgtcacaaagcaatgcctgttgccaaacctgtggctcctccttctccttcccagtggaagtggaggacattggtccccagctttggaccttgcctttcctgcagttgaggtcagtccagtggcagttggaaattcagggcttgtgagggtggctttaccttgcctgtcttcctttgcccccatgaccctttgttggccggggctggacgacagctccctttaaagctctgaaattggagctgaacagctgctgtccagtaaaggggggtgagggggctgtcagcagccaggggggcccaggtggaggtgggggcagggctttgtcactggggagcacacagtctccagctcctatcttctaattccagttttgcctggaccccttctgagatgacggttcttcccttgcttttggtttttcccgctactatccgggagattctaatcacacctgtgtgatctggccctggggcccttagctggtggggactggatatttgggaaaatttccactagaactcaggtctccaagatctatgcccacgtcctcctgcatttaatacaggggggctcctggaagggccagaggatgggccaggctccctgtagcaggggctggctccttggcttggcgtgggcaggcgggcccccatgggtggggactctgcttcctttgacccaaacttcatgggaacaatagacttcagaggagtcaccaggggcaggaaatgggagctgtgcagaggcaggggtgaccctcctgggggatgggattgcatatccggtagagggttgggggcagtgcagagggcgctggggaggggctgatgacacatagggtgggcctctggggtggggccctcctccaaagggggccgttgactcagtgtgaagctagagctcagtgccggttctgtgctgagctttcggctcttactagcacagggctcgtgtttgccagcctccgctcgtgccacgctcgcccctgccaggacttggtcttccccttcccctcaagcccctgagatgtctttgtgaatcatcctggctgggataaaaggctggtgttgttgctccctggctggtctccaccttggccgtgagcactggacaattgtggctggaacggcaatcttgggttgtgggcaaagctctggacagggagtccccaggctggggtcgctggacaacgtgagggatttctttctttttttttttttttttgagacggagttttgcttttgttgcccaggctggagtgcagtgctgcaatcttggcacaccacaacctctgcctcctggattcaagcgattcttctgcctcagcctcctgagtagctgggattacaggtgcctgccaccacacctggctaattttttttttttttttttttaatagagacagggtatttccatgttggccaggctggtctcgaactcccaacctcaggtgatccacccgcctcggcctcccaaagtgctgggattacaggcgtgagccaccacgcgcctggccatgagggatttctttagccgcaggcagagcgagacagtggaacgtctggaggtggaggactcttatcttgcctccatctttataagggtcgaccagactttgtgagaaggccacagcttaccctgagagaattgtgagtcagaccacacgagctgctttgcctgagttcaggttgccggattctcacagataggctttggggtcccaagagaaggtgtaggagtgaccccagaaccactgccaggacctggaaggagggtaggagtaggagagacaacacatgctgtcttgatttgtttcttcaagggagcaagatggggaccctggaaatggcagactcctagaattgattccttgcccaattcttggttagattttgttttttaatgattttttattttttgagacagagactcactttgtcacccgggctggagttcagtggtgcagtcatggctcactccttgaactcctgggctcaagcaatcctcattgccttaacctgagtagctgggactacaggtatactccaccacacctggctaatttgtagtttttttgtggaggtagggtctcgctttgttgtccaggcaggactcaagctcctgggctcaagcaatcctcctgccttggcctcccaaagtgctagaactgcagatgtgagccatcatgccctgccaatttaaaattttctagtagccaccttaaaaaaaaaaacatgaagttaatgttggtgttttcttaaaccctagtattatcaaaaataatttcagtgtaataatttttttttgagacggagtctcgctctttcgcccaggctggagggcagtggggcgatctcggctcactgcaagctccgcctcccgggttcactccattctcctgcctcagcctcccgagtagctgggactacaggcacccgccaccacgcccggctaatttttttgtattttttagtagagacggggtttcaccatgttagccaggatggtcttgatctcttgaccttgtgatccacccatctcggcctcccaaagtgctgggattacaggcgtgagccaccgcgcccggccataaatttttttaaattatcattattattattatcgtagacagtgtcttgctctgtcacccaggatggagtgcagtgatgcggtcatggcttatgcagccttgacctcccaggatcaagcaatcctcccacctcagcctcctcagtagctgggactgcaggtgtacacggttgcactcagcctaggttagatttttgaacaaacaatatgtggagagtgtgaaaatgaagttgagatacctagtagccaacctgggttcactctaccaagtcttagagaaaacaactctaatttgagtggaggaatgttcaggaaggcttttcagtctaatgatcttcttggtacaagagaaagcagtgtggtctggctgatacagcagggagatggatgtgtgactgcttgaaccaatacgctggacgctgactcctgactcctgggcttgtgttactgtgaggaggtccctgtgatgtgccgcagggctgtctttggcttagtcctctatgttttccatagatacgagcctctcccaggagcctgtgtgtcctgtgtcttctgtttctcatttctttttctttctttttttttttttgagatgggtcttgctctgtcaccaggctggagtgcagtggcgtgatcttggctcactgcaacctctgcctcctgggttcaagcaattctcatgcctcagcctcccaagtagctgggattacaagcacacgccaccatgcccagctaatttttttgtatttttagtagaaacagggtttcaccatattggtcagactggtttcgaactcctgaccttgtgatctgcccgccttgacctcccagagtgttggtattacaggtgtgagccaccatgcccagcctatttcttttttttgagatggagtctcgccctattgcctaggccggagtacaatggtgcgatctcggctcactgcaacctccgcctcctgggttcaagcaattctcctgcctcagcttcctgagtagctgggattacaggcacctgccaccacgcctggctaatttttgtatttttagtagaaatggggtttcaccatgctggccaggctggtctcgaactcccgacctcaggcgatccacctgctttggcctcccaaagtgctgggattacaagagtgaaccaccacacctgaccctgtttctcgtttttatgggcgttgagggtagcaaacattggctgatagaaccagggttcgaaatcatctcagttgactggaatgctgccattaagtagaaagatgaagtttaaaaatatttctctcttaaaattaatacatgtacattgtaggaaccctggaaaataaagaaaggcataaagggaaaaaaatgatacataatactataattcgggtgggctggtatttaggtgaatgtccttccaaatttgtgttcatgcaaatctatatattttaacataattgcaattatactctatcccgtttttttccctactgaatgctatctaatgggtaatagtgcatgtcataaaaaatatttaaaaccataattttaaggatccaagtaacattgcattctatgaccatactatatttaactatgccctactgacttaaaaaattgtttttagtttttagcttttaaaaattacttgacattgagcaatgttgaacatatacttatctcaagaagaaatgtaataggtctaagtgtaacatcctgcatttaagttcaaaacatcaattatgtaagtctagaatagagtgggacttactattcattcatgttgagggaaaaggcttggggtttttggctgaaaaaggaaggaagagggaaatgaacattttaatgcctgttaggtgctagacccattattctagacatttctgccttcatcatctcatttcatcctctcagccctgtgagaaaggtttgctttgtttttgttttgtttttcaacctctactttacagaggggacactgtagaagttatactgcagttggagtttgtacccaggtcaatctgactctcaaactgccccattaaaccataagcctgtgtgggccagtgctgtggtaaggtctgtgtcaagggaaacctttacccactaagctctgtgaccctccggccacactggaagccacatctggttttggaaagtttatatatcctgagctgttaagtattgagctcgccatttttgtgggtcttcctctacccccaaccagtgatctgatctcaaacatgtgggactttttttttttttttttttttttttgagatggagtttcgctcttgttgctnnnnnnnnnnnnnnnnnnnnnnnnnnnnnnnnnnnnnnnnnnnnnnnnnnnnnnnnnnnnnnnnnnnnnnnnnnnnnnnnnnnnnnnnnnnnnnnnnnnnnnnnnnnnnnnnnnnnnnnnnnnnnnnnnnnnnnnnnnnnnnnnnnnnnnnnnnnnnnnnnnnnnnnnnnnnnnnnnnnnnnnnnnnnnnnnnnnnnnnnnnnnnnnnnnnnnnnnnnnnnnnnnnnnnnnnnnnnnnnnnnnnnnnnnnnnnnnnnnnnnnnnnnnnnnnnnnnnnnnnnnnnnnnnnnnnnnnnnnngagccaccgcgcccagccttttttttttttttttttgtgagacagggtcttaactctgtcacccaggctagagtgcagcgttgcaatcacagctcactgtggcctcaacctcccgcgcccaagtgatcctcccacctcagctttctcagctactcaggtctcagtagctgggaccacaggtgataccatgcccgcctaacattttttttgttttaatttttatttttcatagagacaggatcttgctgtgtttcccaggctggtgtttttttgttttgttttgttttaatagataggatcttgctctgttgcccaggctggagtgcagtggtgtgatcatagctcactgtagcctcaaactcctgcactcagatggtcctcctgcctcagtctcccaagtagctgggatgacaggtttgtgccaccatgccctgccaatttttaaaactttttgtagaaacaaggtcttgctatctttattttgcccaggctggtcttaaactcctcgcctcaagcgatcctccagcttcagcctcccaaagtgctgggattacaggtatgagccactgtgccgggcctgtgagtgtcttaacagaggctggatgaggacttagaacctgcccagcatctgggtgctgtcatttctcatttctagaaggtaggcaccctttacagcagtagcaggttaggtccatctgacctgaagtctattacttcattatgtaaaaccacataaaactagtgggccctctgtatctgtaggttccacatggattcgaccaaccctggatcgacagtgttcaggggaaaacattccacagagttccagaaagcaaaacttgaatttgctgctcactgaatgctgcattgaatccatgcaaattaagtgatgtgcatgcgttgtgttaggtatgataagttctctagaaatgatttaaagcacatgggaggatgtgcgtaagttatgtgcaaacactataccgttttatatgagggacttgagcatcctcgggtttcagtatccttagaggccttggaaccgatcccccacagataccaaaggactactgtacatagagtttcattatgtagaacttactagggatgctttggaggagtctctgccctgcatgggaaaggactaggtcacctccagggccactgcttcctcgaagattttgtggtcctgggcctcagtttctccacatatcagcatgcggggattccactagatgaaacacttcgggattcctgctacagggaggtagcgcgaagctgcacctggagttggaggcaaggcttgggacgagggtgcagtgtctgagcagtcagaggaagcagaatggggagatgagggaattattgcgtggctgccatcgtctttgtccaaacgagcatggtgttaggaacaggcggaatctgggtcctgccctgaggctggagggtggggaagatgaccccccacaaccccagagagcagtggctatcagtgcagactccagagtggtgctgtccaatagaaatacaatgtaagcctaggagctacatttaaaaagtaaaaagagctgggtgtggtggcttttgcacatggtcccagttactcaggaggctgaggcgggagagttgcttgagcccaggggtttgagaccagcctgggcaacatagcgagaaccctgcctctaaaaaaagaaaggaaaacttaactggtaaaatgcattgtaataatatattctttaacctatgactacaatattatcattttaacgtaatcaatagtaaaaagtatccatgagatagtttaccttttttccacagaaagcgctagaactgtagtgtgtattgtacacttaacacgtctcagtttggactaaccacgtttcttgtgttcagtaaccacgtggggcgagtggtcgtggttggcactgtgtggctttccagccagcccgcctgggtttgaatctctgttctgccacttaacacctgggtgggataataagattaatagaaccaacctcatacggtgtatgtgaagactaagtgagttaatatctgtaaagtgcttagttctttccccggcacataataaccactgtgtaagtgtttgtcaaataaatgacctataaatggttcttaaaaactgtcgaagctggaatttgtaagaggtagggggtcgatgatgtgtgtggaaaaacccaatcgtagagtggccctgtggagttactgatagtccacgtctgtactgtggtagttctccataatgaaatggacttcagatccgaagatcctaatctactctttgctgtgaagagcacctgccttctggaagtgagaaatgacagcatcctgatgacaagacaggttcccatccctcagcaggtgcatcctgagcatctgtctgcctggggcttgaactgtgccgggtggcatgcaggaagcaaaagcatcctcggaaatgctccatcataaattgcatgacctcatgttggaatgagaggtggggtcacttccagcacttggaggttgaagcaatagttgctgcttatgcaagagaagaagtaagctgtaccagtgcctcccatacctcctcagggcactgccagcccagcacagccagctctcctctcttggcatcagctccctccgactgcacctgccctctcccaatccacagcagccacagcacccacggtgtgcctggcactgtgctaggtgcagtgggagtatggaacggaagccctggttcctgtcctcacggaacttgcagggaaatggactgtgaagctagcagtaacatactgcaagacgaaagaacgtgcacaagcagggtctgtggcagtgcctggtaaaggatgattgattctgtcccaaggtcccaagaggaggaggcagttgagctggctttgagagtgggtggggttctgacaagcgtgtatatgtaagagagagggaagcagacagagaggaagagaaacaactatccttgagaagacagagaaaatgtagtgatttgagggctattgtcatgaagtgatgagaggagcggaggtaagtgggttttgttttttgcaggttttatttttatttttatttttattttattttatttatttttttgacagagtctcgctctgtcgcccaggctggagtgctgtggtgcgatctcggctcactgcaagctccgcctcccgggttcatgccattctcccgcctcagcctcctgagtagctgggactacaggcaccccccaccacacctggctaattttttgtatttttagtagagacggggtttcaccatgttagccaggatggtctcgatctcctgacctcgtgatctgcccgccgcggcctcccaaagtgctgggattacaggcatgagccacccctcctggctgtgggttttatttttatatccttttttttttctttctttcttttttttttgaggtgaagtttcactctgtcacccaggctggagtgcagtggcacgatcacagctcactgcaacctccgcctcccgggttcaagtgattctcctgcctcagcctcccaaatagttgagattacaggcacgtgtcatgatgcccggctattttttgcattttcagtagggatggggttttgccatgttggtcaggctggtctcgaactcctgacctcaagtgatcccctggcttcagcctcccaaagtgctgggattacaggcgtgagccacagagtctcactctgccacccaggctggagtgtggtggtgtgatcacagctcccttcagccttgagctcctgggttcaagcaatcctcctgcctcagcctcctgagtagctgggaccacagacatgtgccaccacacctggctaatttttaaaacattatttctagagataggatctcactgtgttgcccaggctggtctcaaactcctgggctcaagccatcctcccgtctcggaccctcaaagtgcttggattatgggtgtgagccaccatacccggccaagtgggttttatgaacagggtgggtttgagctaggccctctgggcaggataagaaggtcttattttacgtttattttttacgtttatttagaatcaggcatcatctctcttttttttttttttttttttttgagatggaatttcgcttttgttgcccaggctggagtgcaatggtgcaatctcggctcaccgcaacctctgcctcctgggttcaagtaattctcctgcctcagcctcccaagtagctgggattacaggcatgagccaccacactccactaattttttgtatttttagtagagacagtgtttctccatgttggtcaggttggtctcgaactcctgacctcaggtgatctgcccgcctcggcctcccaaagtgctgggattacaggcgtgagccaccgcgcctgtagaaaaacatctcatcctataaaatagagtgaatctttccctaaatttatttttaacatacatacagcaaaatacactgtttttggtaagtagtagatgttgacaaatgcacagaatgtgttttaaccgccaccatcaaggtaaagactgttccatcccccaaacgattccatcatgcagtggccccttggaggtcatccctcccccttcccctcttggcatcccctggccacgctgatctgttcattcctataattttgcctttcaagaatgtctcacaaatggaatcatgcagttacgcagctctttgggtctttgcttctttcactcagcaaggtcatagctcactgcagccttgaccacccaggctcaagtgtccctcccacctcagcctcttgagtagtggagaccacaggcacacgccaccacgcccggctaatttttgtactttttgtagagatgaggtttcgccatgttgcctaggctggtcttgaactcctggctcaagcagtccacccgccttgcctcccacagttgtgggtgtgtgccaccatgcccagctgttgttctgagagttctttaatattctggatacaggttctttgtcaggacagtcagatctgtgatttacagatgtttggaggaaattaatttatggagaaaatcttcacaagatgatgggagtgaggaactctgaaagtgaggtgagagtttggtgtcctgagctgtggcctttctcacagtgcaagatgggaccaggaatgaggagtggggtacacctagagaatgacatgaaaaagaggagtcacggggccttccaagaagctctgttcctggcgtagagcatggttcagaatgagaggcacaggtgggaattttggtttgccaggcatccttcctgcctggcgggctgcaccaggtctgcggctaatggcctgctgggtcaggccgggctggccccatccagaaaaacaaatgttcacgtccagcctgcatttcaaccacttccatggccttgtttccaaaccggatgagcgtgccttctggaatgggaggcgcggtaactggcaggcctgcaggagtaaggtgctgggtgtgtggctggtgcaagacagaatcagtgggggtgagttttctgggtcagggtgggtcctctgggatggtaacctcagcctagggtctgagtgaaggcttccagctatttttttttcttttttcttttttctgagacggagtctcactctgtcgcccagaccggagtgtagtgtcacgatcttggctcactgcagcctctgtctcccaggttttcaaggtgccttagcctcccgagtagctggaattacaggcttgagccaccacgcctggctaatttttgtatttttagtagagatgggagtctcgccatgttggccaggttggtctcgaactgttgacctcaggtgatccacctgcctcggcctcccaaagtgctgggattacaggcgtgagccaccgtgcccggccagctttgagctgttaacagaatgtctgaaacatcataatcttccttcctatccctgaccaggcagggtggctctgggacagaagacttacatgaaaaatgaccaaggccaggatggatgccgcctcccacttcttgtccaagctcattctaaccccgcctgctcctatgtcctcagagccatggcccagtccagatgctcgagtcttcattcttcccccgggggtgcagatgcttttccggaggtgcttagggcgtagggctggagagtagggcagagctggagtcctactttcccggagctcctagtgccccactgcctccagcacgtcctgtggctccctgaggctctgggtcctggaaggcattcgctggtgtggagactccctcttctgcctggctcctccttctcccagggcagggcgtgcaccgaggccccaccccagatgcccgtgctgcttggacacctggtttgggctgaccctcgggttctgacagggtgggatcctcctgcctgtctttgagacagcagctgattgagggcaaacccacccccgaggctgaggaaacaagtgtgctggctttgacggaattccagggcaagtgcttctgctagtcactcccgggctaaatctattaatattttcagatctgcattttcctaggacacacctccttaaagtgaagccaactggtttggttgagtacttttgcctctcaagtactgtattttcataatttttgctttttgctttatttcacttttaaaattttgtatttatttattttttagtatccctgtcatggcaacttttgctttattctagaaccctgaagaaaggccccgaggagaaaaagtctctcaacccttaaaaaaaaaaaaaagactataattttgagtagtttggggtttatagaaaacttgagcagaaagtagacttcccgtagatacattcttgccccgcccccagtcagtttctcctagtcttaacatcttgcatttgttgcaattgatgtacatttgttgcaattaatgagtcaatatcggcacattattattattattattattattattattagagacggagtctcgctcttgttgcccaggctggggtgcaatggtgtgatctcggctcatggcaacctccgcctcccagattcaagcaattttcatgcctcagcctctcaagtagccgggattacaggcatgcgccaccacacccagctaattttgtatttttagtagagacagggtttccccatgttggtcaggctggtcttgaactcctcacctcaggtgatccgcccacctcggcctcccaaagtgctgggattacaggcgtgagccaccgcgcccagccagcacattattagagtccatagttcacattagggtcccttcttggtgttgtccactctgggttttggcacatgggtagtaatgtgtacccaccattacggtgtcatgcagaatagcatcaccgttccccaaatcctccaggttccgtttattcatccctccttcccacttctggcaaccattgatcttttgactgtctctgtagtttcgccttttctagaatgtcatatggttggaatcatacactatgtggccttttcagattggcgtctcactaagtaatacgcatttgagtttcctccttgtcttttcatagctcattttttttttttttgagacaaagtctcgctctgtcacccgggctggagtgcagtggcatgatcttggctcactgcaacttctgcctcctgggttcaagtgattctcctgcctcagcctcccgagtagctgggactacaggcacgtgccaccatgcccggctgatttttatatttttagtagacacaccattttgtgtttcaccaagacgccgggctggtcttgaattcctgacctcagatgatctgcccacctcggcctcccaaagtgctgggattacaggcgtgaacctccacgcctggccagctcatttctttttttttttttttttctgaatagtattacaccccgctcccctccccaaccttttgtttttgcaaatggaggcactgaggcccagagaggggaagtgactggctcaagaggcaccacgaacctgtggcaaagctgcgcttggaggctaatttgccttcctctgggtacctgtttccaggggcctctgggccgggcgctgttctggaactaaacctgtatcatcacagctttgtccagaggctgaggggaggccagggggcaaggcctctgttcaccacttgccttgacccacttcctgcatgtgttgggtggggcctgcagatacccacgcccctgacgcggaaggggttgggggtggggttcccagcttccacctccctgagagctgaggagatgggatgctgggtccaggcaagtactcgccaccccactgccgcccgggcctgggggctgggtgggaagagactgcttgggttgggcctgggctggggcctgcagcatttaggaatcttatctccctctgttgctctctgagctgcccctcccactggagactcctcccagctggcctgcatcccaggccatctccatttacttaatttacctcccctcttgctagcctgcaggcctcctgctccttcctctctgtcccgccctccatcatccctcgtgatgactacagggcaatgaccgtgaatcacgtgcgaggagcccctgtttgggccgggctctgtgctcctgtctcatggacatgatggaattcaatcctcacagccgttatttggggagattgagattgcactggtgcctcttcagtggttgggaggacactgaggattagagtagcttgctcaggactcccaggtccctgtgaggctgggccaggatctgagctcaggcgtcttgagtccagagcccaaacgctaaatctctgccccaggcgtctctctctctctttctctttctccccttcctgctctctctccccttcccccttcccttctttttcctctctcttttgaccagtcattgctcaaggggtccagctctctgacttttgttccaacatctccttagcctgggaaggattgtggggcctcccctcctctcacctgctccccgttccccatcctgtcctgaagccaggtgtgatgaaggcctcacaccaaaggatggccgggaaggtgctgccgtgcattgccttgcaggggctttacttgcttttctcaatcctcagtggctctgcaggcaggaatgctcatccccatttgacaggtgatgaaacagaagctttggggaggttcagtaagttgctgaacagctgtgcaacgtagctggtgagaggcaggtttcactcaggtcataggactctgaggcgtctttaacatgtcccggacttcacgtggcctttcccgagaacttgttgcatttcaggagaggaaggggcactgctcagcaagaggaaggcactccagtggtgggagctcaggccccgggacacctaggttttcttggtcttgttttctgagaagggcccttttttggcctccggcaggccctggcccttccgaaatcacaatgggatctgtttgtttctaactgagtacacagcctggcccggcccagcccaaccaaatccatttctctgctgggttctttccttctccaccaatccctttccttccatccctcgggactcacctgcctgtgacctggggactctcctgtccttctcttttcttttccagctgtaaccaggccctttcctttgctcctgtattttgggcccaggtcccctgcagtccctcttttccttctctgccctcttctttttgtcttctatctcctggtgtgctttaaacaatttttttggtgaaatgtatgtaacataaaatttgccatttgaactccaagtgtgcagttcggtggcattaaggacattcacaattgtgctgcagtctcctgcttccatctccagaactttttcatcttccgaaactgaaacgctgtacccgttaaacagtaagtgcctggtttttttttgtctttttgttttttttgttttgttttgttttgagagggagtctcacttcactcactttattgcccaggctggagtgcagtggtacgatcttggctcgctgcctccggggttcaagtgatttttgtgcctcagcctcctaagtagctgggactataggcctgcgccaccgcccctggctaatttttgtattttttagtagagacaggtttcaccatgttggccaggctggtctcgaactcctgacctcaggtgatccacctgcctcggcctcccagagtgctgggattacaggtgtgaaccactgcgcctgacaatgactgttaatgttatgaatgaaactccccattcccccatccccaacccctgatagtctctcttcggctgtctctatggatttgcatattctcagtacttcatggaagtgaaataacatgagatttgtcctttcatgactggcttgtttcacttagtgcaatgtccttaaggttcatccatgttgtagcctatgtcagaatttcatgccttttttgtttgtttgttttggagatggagtctcactctgttgcccaggctggagtgcagtagtgtgatctcagctcactgcaacctccgcctccctggttcaagcgattcttgtgcctcaacctcccaagtagctgggattacaggcgcctgccaccatgcccggctaatttttgtatttttagtagagacagggtttcacattgttggccaggctggtctcgagctcctgtcctcaagtgatccgcccgtctcggcctcctaaagtgctgggattacaggcgtgagccaccgcgcccggtctcattcctttctaaggccgaatcatcctccattacctggatgcaccacattttgtttatccattcctctattgatggacatttgggctgcttccccttttgactatcctggtgccttttgacattctgtgcttaggaacagtagacagcacttccgcactatgcttggggccactggaggcagcaaaaccacctgcaaaagtgcagaagtcatagcactaaatagacccagaacaagacacttgcaggagagccgacccaggtagacaaagtgcggcgttgccgacctcagctgggagcgtgcgcgtcaggcagtgagaatttgtggctgctcagtgcatgcatgtgtccgcaaatgactgtgaaaatactgggagtagtgatttgggggttagaaattttagcaagttggcaaacttgcaaatacaaaatctgtgactattctgtgattaatgaggattgactgtacttgcatcttcatagatgactctccctcattccctcctgagatgacagcgttaatccattcagcaaggcccaatcacatcttaaaggctccatctcccaacattcttgtgttggggattaagtttttaacccatgaactttgaggggcacattcataccagagcagcgcccaatgcctgtcatatagtacatgcccagtgaacagtgagtgaatgaagggcacaaggactgaagtacccgtgctgagttgttaggcatgagaatcagcagggagagatctttctggcaggggagcctgttcctctcctccctgggaacaagccctctcctgtgctcaccgagaggcatccagtgatggtcatggaggttggaattgtgtggcagaaaagtgcaggcctgagatgtagttctagtcccagttttaacaggttttgtggtctttggcaagtcacttcacctctcagggccttagtctcctcacttatacattggagggcagttttctcccccaagattctttcctcacacaaaccctgggaaccctgcctctctccgctgggatcttcactggaggctgtgggaacagtggggtccacgcaatgaaagagaccaagaggtcttcgtgtctgcagagatgaacttctctagctcccttagcctgccaatccaggctacccctccctccaactctgcacatctaacttgcatccctcgtgctgcagagtcagatcatcccccttcctattgccaacagaagtgtttgcaaaataggccggatgtggtggcttacgcctgtaatcccagcactttgggaggccgagacgggcggatcacttgaggacaggagctcgagaccagtctggccaacatggtgaaaccccacctctactaaaaaaacaaaaattagctgggcatggtggtacatgcctgtaattccagctactcaggaggctgaggcaggagaatctcttgaacctaggaggctgagattgcagtgagtccatatcgctccaccgtactccagcctgggtgacagagcaagactctgtctcaattaaaaaaaaaaaaagttggcaaaataggtcaaagaagcatcatggccaggcgcagtgactcacgcctgtaatcccagcagtttgggagggcaaggcgggcagatatctgaggtcaagagcgaaactccatctcaaaaaaaaagcagcatcatgatgggcaggaggcagcttgcagtggggaagggcttcagagccgcagtctgagccttgtctcttactggctttgggctgggacacagcacttcaccttaggagcctcagcatcttcacctgccaaatggggcagtgcagctacctcaaggggatgggggcaggattggaggaagatgtagtcaagtgctttgcccagtgcctgatgcagagtgggcatttgaaactggcacctcctagtgttaaagtagtaaaacgtgtgttcctcggtgtcctgggcacctctttgacactcagccctctcacaagtgctgggctgcctgtatccgtcctgcagggtcgcctgcccagtgcacaggggcttgcactgtgtgaggaggcagcacagcccacccggcactacctgcaggataggttctttcctgcccaggtcccctggcctcctccctttgtctcccagctcctgagtttccaagcttagttagcgtggaagacagcagacaactgactggccagagtagcacggcacattcaggcaatcagtgtagcagctcaggggcctctgggaactggggctcagggaacccttcagggtggagggggcctctcactgcactcgcttgtgccctgtacctacctccacccaagcctctgactctccatagcacttacctgtttgcatgtctgtctagtctcccatccccatctgaagtctgagccccatgagggtctggacccttttctctagagttaagtccaagaacaggtactttaagtaaagagttagttgatggactgttggcaggaattaaattagtactgaggcccaccctaagcagggaagcagtatgaacagacttggggctcaggagatggtgagaagcccaggggtgctggagggtagtggggatgcgcctggaagaaggctggggtctgctgctcctctttcccgtctcattttaagagatgatttctcttaaaatgaagagacttctccatttcttattttgagagatgaagcccagtgacccccaaaatcagggtgttttcttctgaattatctgtctcagctctagaggctggaggagttgtgaggggcttagggatcacagtggctgcagaaggctctgaaaggagggctctgggagcttgagatggatcggactggggagaggacgtcaggttggcctggggtctggttctgccttttctcggggcaggtcctttgccctccctgaggcttggcctctccatttggaacttagcatcctgattcccttcctgtcctgaaagtgttttgggaggagcttactgttctgagtattagggagatcttaataaaagcccatacattcctgatccttctggaaattcctgagtaattagcacctgtgggccctaggatggagcaacctgctgtcttctggggttgccctgggggctaccctgtagcttttggttggggctgaggcagagtagaggctcctgggctgggccctgagaaccaagtcagggattatttttactcttctgttcacagcgcatggcccagctccacgatgccatctgtcccccgcctccggctctcccctggcaggccctcctgggtcactgtggagcacttggggaaggaggaggaggctggtgctggcttaccccattccatgagccacagggcagggcggtgcgtgggaggtttgcctggtggcgggaggcagctgccagccccgggatgtgggccgcgggcagataggagaagctcgccagtgacggctgtgaacctagagcaccagggacacgtggggctgggagcaactccatttcggtaacaaaccctgtggcccagggccttggatgacctgctgccctgcttttcctgggacagacccaatcctagggacatggagtgcaggtcctcagaaaaccccactcgtggggcagggtctggcattaggagtctttggttctccccaggtgtgtgttctgctgggctgccctaggcccaacttctgcagggactgatggtgctcacttcaccaggccagtccagctcagcttgggtgaaggaaggggaattctgaggaggagcggggcccagagaccatagaaggggtcaggtggggtaagggaggtggcggccctcctttccatctcctgacatcctggtctccaccgcaccgtctacctgactcagggcatccatctgtacttagtgtcaggtccagaagaaaatctaggctacaaccaggacttaagaggcctcaggtattaaaatgattaattaagtattaatattaggcattagggcttcagactttctacttggcattgtttatggcttaataacaatgaagacaataagaaatagctcttatgagcactgactgtgtcaggccctacactagatgacatctcactatgtcatctctcctgcgggacagccttctgggatggatcagttccccagccttctgagcagagccacacgtgaaagtctgcaaggtacttctagaggccactggagacttctgggatctggggagggagtgtgaaccacagatactgctagcacagaaaggaccctggatcccaatgagggcatccttcttgttttacagatgagcaaaatgaggcccagaaaaatgaggtggtttgtctgtggttgtgtagttggtggtagaactggaaccaaagccaggctcttgcttcccatacatcacacttccattctacaagcctccaaaataagccccaaagggatttgtgcacaattcaagctctttttctggtatgccaaaatccagacatttcctgaggtttcttttgtttcccaaaactaagcacagagcaatctgttctccccacagagaaatcattattccacaataacacttaacaaatatgccttcgtttgttcattctgtgttcatcagctctgtgcagcgtgctgaggacttacagaggaagacagctgtccctgtccccatggtgtctaaagtgtggtggagaccagtccttactgggagatgggggctggatatggaaaggcaggaatctgctaaggttggagtcatcttcccagggggagtgacatacggctggatcttaaggctgagcaagggttggtccggtgaacaaggaatggaagggaagtttcaggtagcagcacctccaccaggagtggagaaagagcctagcatgttggagggtgatttggatggctgagtttggggcttggaggtgggttcaaagaaggtggtgcctgtgtgcggaaggtatggccggagagcagggatcagcagatgcaagcgctagaaaatcccatcatggagtgtgtagtgttatcttaagaacaaagaaaaggcattcaaaatttttaggtagcagaatcatgtgatcaggtttgcattttagaaaaatcactcaggctggggtgaagagattatggagcctgaatggggttgcacccgtcatccagatgtgcatcgctggaagcttggattagggctgtgagatagagtagattcaggagacatgtaggcgacagaaaggcaggatgtggtcattagttagatgtgggagatattaataagagggaaaagtccaaacagtcatgtgctgcttcacgaaggggatgcctcctgagaaatgtgtctcttggcgatttcatccttgtgcaaccataatagagcatccttacacaaacctagatggtatagcctacgacacacccgggctgtgtggtacaacctattgcttctgggctataaatctgtacagcatgtggctatactcagttctataggcaactataacacagtggtaactgtaactgttagtatttgtatatctcaacattcctaaacatagaaaaggtacagtgaaaataaaatataaaagataacaaatggcacacctgtatggggtacaccatgaatggagcttgcaggactggaagctgctctgggtgagtcagtgagtgaatggtgactgaatgtacgctactgtaggcttgactgtacactactctacactaggacattactgatactactgtagactttataaaaacagatacttaggctatactaaatgtatttaaaatgatttttcttcaagaatatattaacttggctttctgtaacttttttactttataaacttcttaattttttgattcttttataataacactttaaaacgcaaacacctcacgcctgtaatcccagcactttgggaggccgaggcgggcggatcacgaggtcaggaggtcgagaccatcctggctaacatggtgaaaccccgtctctactaaaaatacaaaaaaaactagccagtcgtggtgacaggcacctgtagtcccagctgctcaggaggctgaggcaggagaatggcatgagcccgggaggtggagcttgagtgagccgagtttgtgccactgcactgcagcctgggtgacagagcgagactctgtctcaaaaaaaaaaaaaaaaaaaaaaaaaaaacccaaaaacgcaaacacattgcacagctgttcaaaaatattttcttaatttatatctttattctttaagccttcttctgtgaaccaaatcttttttnnnnnnnnnnnnnnnnnnnnnnnnnnnnnnnnnnnnnnnnnnnnnnnnnnnnnnnnnnnnnnnnnnnnnnnnnnnnnnnnnnnnnnnnnnnnnnnnnnnnnnnnnnnnnnnnnnnnnnnnnnnnnnnnnnnnnnnnnnnnnnnnnnnnnnnnnnnnnnnnnnnnnnnnnnnnnnnnnnnnnnnnnnnnnnnnnnnnnnnnnnnnnnnnnnnnnnnnnnnnnnnnnnnnnnnnnnnnnnnnnnnnnnnnnnnnnnnnnnnnnnnnnnnnnnnnnnnnnntctaaaaaaaaaaaaaaaaaaaaaaaaaaaacccaaaaacgcaaacacattgcacagctgtacaaaaatattttcttaatttatatctttattctataagccttcttctgtttacaaaatctttttttttttttttttttttttttgagacggagtctcattctgtcccccaggctggagtgtagtggcacgatctcggctcactgcaacctccgcctcccgggtttaagcggttctcctgcctcagcctccctagtagctgggattataggtgcgcaccatcatgcctggctaatttttgtatttttagtagagacggggtttcagcatattggccagggtggcctcgagctcctgacctcgtgatccacctacttcacctgtttttttactttttaactttgtcgttaaaaacagagacataccagccgggcgtggtggctcacgcctgtaatcccagcactttgggaggccgaggtgggtggatcacgaggtcaggagttcaagaccagcctggccaacagggcgaaaccctgtctctactaaaaaaatacaaaaaattagccaggcatggcggcggttgcctgtaatcccagctacttgggaggctgaggcagagaattgcttgaacccgggaggcagaggttgcagtgagctgagatcgcgtcactgcactccagcctgggcaacaagagcaacactccatctcaaaaaaataaaaactaaaaaaaataataaaaacagagacaaacgcacacattaggcctgcacagcgtcagggtcgtcagtatcactgtcttccacctgcatgtcctgccccactggaaagcgtttggggcagtaactcgcatggagatatcatctcccagggtaacagtgtctttttctggaatgcctcccgaagggcctgcctgaggctgttttacagtaattttttttttacaagtagaaggagtacactctaaaatgatgataaaggctgggcgcggtggctcacgcctgcaatcccagtcctttgggaggttgagacgggccaatcaccagaggtcaggagttcgagaccagcctggccaacatggtgaaaccccgtctccactaaaaatacaaaaaattagccgggcgtggtggtatgtgcctgtaatcccagctactcgggaggccgagtcacgagaattgcttgacctcaggaagcagaaggtgcagtgagctgatactgcaccactgcactccagcctgggtgacagagtgagactctgtctcaaaaaataaaaaaaaaataaaaaaatagatataataaaaagagacgataaaaagtatagtatagtaaatagttaaccagtaacacagtcatttattgtcaaggattgtgtactgtacataattgtgtgtgctagacttacacaacaggaagcacagtaggtttgttttacaccagtgccaccagacacgtgaggaatgtgtggcactgccatggtaggatggctctgatatcactaggcaacaggaagttttcagctccattatcatcttatgggaccccctttgaatgaacgtttggggctgactgaaattttgttatgcagtgcatgaccgcgttcctagctttctggtctctgtgtggatagtggttcatttcctgagagagagccgaggaggtgaacaggatttggggacaagctgaacacttggttttgggcatgttgagtttgaggagctctggagattgattagagatgcctggtaggcagtttctgtgaggaccttcacctcaggaaagatacacagatttggggattaaaccaatatagtgggaatgcaagccttgggtggggatccccccaggagtctgtttagggtttaaaaagaagaggtcaggtcagaacccagggacacatctttatagaatgagtctggtgaaatatggagcccagggaatatggagaaaggaagcctggagccgacttggaagactggagactcctcctgctgcttctatgtgttttcagaatcagcttgtttttttgtttgtttggttggtttttttgtttttttgagacggagtctcactctttcacccaggtgggactgcagtggcgcgatctcannnnnnnnnngaggttttcttccttgctgggattctaggcgtgcgggtgagttgaacattgcgggaaatcaatagggcccaccagataagtgacagacgattatttagtaatttgcacagattttttgagatgttgtggctttgcaaacatttctttatgatgtggggactgatttgagaaggggtttaactgcataagcccgtacggataccacctgcgccatggctgctcaatgcgtgctcagcctgctgggtggacgccattattctgactcagcctccagaggcgctgggaatccgggcgccggacatcatgcccgggtccttttttggattttttggccctcggggtttcaccgtggtctcgatctcctgccctcgtgatccgccggcctcagcctcccaaagtgctgggattacaggcctgagccactgtgcccagcctggaatcagcttgttaagctttgtggaaaactgtgtggaattttttaaaatcacaatttcagggccgggcacggtggctcacacctgtaatcccagcactttgggaggctgaggaggaggatcacttgaggtcaggagttcaagaccagcctggccaacatggtgaaaccctgtctctactaaaaatataaaaattagccaggtgtgatggtggcacgtgcctgtaatcccagctacttgggaggctgaggcaggagaatcacttgagcctgggaggtggaggttgcagtgagctgagatcacgccactgtactccagcctgggtgacagaacaaaactccatctcaaaaaaataaaaataaaataaaaaatcacaatttcattgaatttatgatttatttggagagattcaacatcttcataatattgttttcccattcatgaacacagtttctctccatttatttaggtattatgacactgtgaaatacatactaggggtctggcgctgtggttcaggtctgtaatcccagcactttgggaggctgaggcgggtggatcacctgaggtcaggagttccagaccagcctagccaacatggcgaaaccccgtccctactaaaaatacaaatgcaaaaattagccgggtgaggtggcgggtgcctataatcccagctactcgggaggctgaggcaggagaatcgcttgaacctaggaggcagaggttgtagtgagccgagattgcgccactgcactccagcctgggcaaaaaaagctcaaaaaaaaaaaaaaagatatattgggacttcattcagtttcctgccatacaactcctaaaatccttgcaatcttcaaaacgatgtgtctttttgtatgctaatgagtcgatttagggcttgcagtccctaggtagcttcaggatgggaccagactccagaaagacaaagggcaggattagaggggtggaactttcagccacaccctccaacctcagggaggcgagaggggctgaaggtcaagttgatcaccagtggccaatggtttaatcagtcatgcctatgtaatgaagccaccatagacacctagaaggactgtgttcgaggagcttccagaaagctgaacaggtggagggacctgaagggtggcgtacccaggagagaacatggaagcttctcgaaccgtcccacgtgccttgccctatgcgtctctatcctttgtgagatcctttagaataagctggtaaaggtagatagtgtttctctgagttctgtgagctactgtggcaggttaattgatcttaaggagagggttctaggaaccccatctatagctggtgggtcagaagcacaggtaaaacaacccagggcatgggatgggcatgggaagtcgggaggcagtcctgtggaaccgagcccccaccctgtgggatctcctggcttcaagcaaccctcctgcctctcggcctcccaaagtgctgagattataggtatgagccaccatgcccagccctgtttttctcagtgaggctcttagattggtaaattctctattatttttgtctaaaaatgcctctatttaatcttcactcttgaatgattttttgtttgggttttaaattcaagattaacagatagtttcttttaacaatttggtgatgttatattgagtcttctagtgttactgttacgaagtttgctatcagtttgttgttattattgtttttgaaacagaatctccttctatcgcccaggctggagtgcaatggtgcaatatgggctcaccgcaacctctacctcctgggttcaagtgattctcatgcctcagcctcccaagtagctgggatgacaggcgcccaccaccacgcccagctaatttttgtatttttagtagagacaggggtctcactatgttgcccaggctggtctcaaactcctggcctcaagcgatccacctgccttggcctcccaaagtgctgggattacaggcatgacccatcacaccagaccaagaagttcaatatcagtttaatagtccttactttctagataatctgccctttttacctctccatgcttttaagatctctgttttgggtattctgcagtgtccctatgttatgtgttccttttatttgaatttatcctggttaggattcagcatggttcctgaattattggagtcatctcttctattaatctggaaaattgcctgctgttatctcttcaaatgttgctctactttatttattttctatgttctctttttctggaattctgatgttgaattgccttattctgttctccttgctctttactgtcatttaaaaaatacatctgggtaatttcctcagctctgtcttccagattgttacttctttatctagctttatctaagttgttaatcccaaccattgagtttttaatttcaatgactacaatgtttatttttaaatgtttgatgtagttctttttccagcctactttgtagttttgataatatcttgttctttcccatatttacaattccttatttaggtcaataatcatttaaacataatctcttcagagattttcagcctgggaccactgtttatttttaagaattggctagaagttactaagtgatataaaattcaaatttcaaatccattaaagggtaggcccttggttacaaattcttttttttaagaattattttttatatctacaatttaggctaagacagagaattttttttttttttttttttttgagatggagtctcttgcctaggctggagtgcagtggcgtgatctcagctcactgcaactctgcctcccaggtacaagtcattctcttgcttcagcctcccgagtggctgggattacaggcgtgtgccaccatgccaagctaatttgtgtatttttagtagagatgaggttttgccatgttggccagactggtcttgaacagctgacctcaagtgatccgtctgcctcggcctcccaaagtactgggattacaggcatgagtcgcttcgcctggcccagagaatcttcgctgtcatattttgtcagtgttctactggttctctgaggatttaggtatagttcccagtttcagcttctctgcatctctcaggtctaaggtctcatctctgagcagccattaaaacccgattgtggccgggcgccgtggcacatgcctgtcatcccagctctttgggaggctgaggcgggcgaatcacaaggtcaagagatcaagaccatcctggccaacatggtgaaaccccgtctctattaaaagtacagaaattagtggggcatagtggcgcacgcctgtagtcccagctacttgggaggctgaggcaggagaatcgcttgaacccgggaggcagagttgcagtgagctgnnnnnnnnnnnnnnnnnnnnnnnnnnnnnnnnnnnnnnnnnnnnnnnnnnnnnnnnnnnnnnnnnnnnnnnnnnnnnnnnnnnnnnnnnnnnnnnnnnnnnnnnnnnnnnnnnnnnnnnnnnnnnnnnnnnnnnnnnnnnnnnnnnnnnnnnnnnnnnnnnnnnnnnnnnnnnnnnnnnnnnnnnnnnnnnnnnnnnnnnnnnnnnnnnnnnnnnnnnnnnnnnnnnnnnnnnnnnnnnnnnnnnnnnnnnnnnnnnnnnnnnnnnnnnnnnnnnnnnnnnnnnnnnnnnnnnnnnnnnnnnnnnnnnnnnnnnnnnnnnnnnnnnnnnnnnnnnnnnnnnnnnnnnnnnnnnnnnnnnnnnnnnnnnnnnnnnnnnnnnnnncgtcctacttcttactgtaacaaagtggcccacgcatctgtattcccagttacttgggagggtgaggcaggagaatcgcttgaacccaggaggcagaggttgcagtgagttgggattgtgccactgcactccagcctggggacagagcgagactccatttcaaaaaaaaaaaaaaaaaaaaaaaaaacccagttgtggccgggcatggtggctcactccatgggaggccaaggagggagaactgcttgaggctggaagttcaagaccagcctaggcaacgtagtgagacctctacagtaaatacgtaatctctacagtaaataaataattagccgggcatggtggtgcgtgactagagtcccagctactcaggaggttgaggcaggaggatctcttgaacccatgagtttagtgctgtactaagctatgatcttgccagtgcacttcagcctgggcaacagagcaagaccctgtctctaaaaaataaaaaaatataaaaatttaagtgacgaaaaataaaaaaccagcttcctcattactaagggagctttgctcagtcgtttctaaatttatttatagagtgagagtttaaaatcatcttatctactatattgccagaaattaaagttgacaactcttttaagtagtttgttttgggctgggcatgatggctcacgcctgtgatttcagcactttgggaggccgaggtggatggatcacctgaggtcaggaatttgagaccagcctggccaacgtggcgaaaccccgtctctactaaaaatacaaaaatcagctgggtgtggtgatgtgtgcctgtaatcccagctactcagtaggctgaggtgggagaattgcttgaacttgggaggcggaggttacagtgagccgagactgcaccactgcccaccagcctgagtgaacgagcaagactccgtccccccacagaaaaaaaataagtttgttttggaagtatggaaaaatgttttcatgttcaggatagaatcaagaccagaatttctggtaagagaataagctagtttattcccgataaagcgactctgcccccaaactctcatgaaaacttactttaacagccacagagacaaccggcaacacttgttacactaaaaaggccagtgactctgaagggctgagaacaagaccttgatctgcaccttggcctcactgcacgacctggggcatgtccttagccctctgggcctcagtgcccttttcagcaagctgaaggagctgcttaggtttcctggtggcgggggttggggggggctttctgcttttttttttgaggcagagtctcgctctgtcgcccaggctggagtgtagtggcaccatcttggcccactgcaacctctgcctcccgggttcaagtgattctctggcctcggcctcctgagtagctgggattacaggcacccgccaccatgcccggctaatttttttatttttagtagaggcggggtttcgccatgttggccagggtggtctcgaactcctgacctcagatgatccacccgcctcggcctcccaaagtgctgggattacaggcgtgagccactgcgcccggccggttcctgctttacgtgtcagtggctctaacctctttcccactgcatgtctgtgccagctgctttgccaagctccttttgacctctcctcctgggatgtgcctcccacacttatgcccctcccttccctcgatcctcaccccctccctcacagtgcctctccgggaaggaaattgtccttctcacaggccatgggtgggagatgaggggtttgagggtatggaggggaatgataagcaaggaatgctctgggaggtcccacttcagaggatccgaggtggaagtggtcgaactcaggggtttagacccccagcctgggtttgggctgctgggctgcattgctcctcaaggctagtgggggagaagggacgggcaatgtgtgtgacggggtgaggtcctcctttacaagtggactcggtggctgggatggggagaagttgggggctctgggagggctgtgggaggtacgtggttcccagctggtactcataacccaaaaactgcctgaagattactggtatgtcctgctccttcacaaacccctgagaactatgtttggaagcttacagcttggatggttggagccaagaggtcactggatttgtctcatgttaggggaaggtggggttgtgaccatgagcctccagaggcaccagaaagtcaatcctgccgttgctccagtgtgtgaggagctgcccagactgtttcttttagaaagagcctgagttgggaagggaacaggagaatagtgacctacattatattgtatatgcatttttaaaaatttttcattgtggcaaaaaagaccacaaaatgtaccatcctaaccctcttgaagtatgcaggttggtagtgttaagtatattcacaatgctgcgcagcagatctccagaacgtcttcatcgtgcaaaaccgaaactctgtacctgtcaagtcacaactctgtatctttctcccaccagcccctggtaaccaccattctactctgtttctatttgtttgaccacttaagaaaattaaaaaaaaaaaatttttagtagagatgaagtcttgctaactcctggactcaaatgatcctcctgcctcagcctccctaagtgctgggattacaggtgtgagcctctgcaccctgccgactactttatttttattttattgtattcatttattttgagacagagccttgctctgtcacccaggctggagtgcagtggcgcaatcatggctcactgcagccttgacttcccaggcttaagtgattctctgccctcaccctccagagtagcggggattataggtgcgagccagcacacctggctaatttttttttaattaattttttgtagagatggggtctccctatattgcctagactggtctgaaactcctgggctcaagggatcctcctgcctcagcctcccaaagtgctgggggtataggcatgagccactgtgcctggcctaatgtgactgcttagatacctcgtcagcggaatcatgcagtgtttgggttgttttgtaactggcgtgtttcactcagcataatgtcctaaaggtccgtctgtgctgcagcacgtgtcccggttgccttcctttttaaagctcctatttcgctgtaggtatacaccacattttgttcatccattcatccattgatggacacttggtttgcttctaccttttgactcttgtgaataatgctgccgcgagcatgagtgtacacatatatctttgagaccctgctttcagtttgtttgggtatatacccagatattgggtcatatggtcttgctctgtcgcccaggctggagtgtagtggcgggatctcggctcactgcaacctctgcttctcggattcaagcgattctcctgcctgagcctcccgagtagctgggattacaggtgcccgccaccacacctggctaatttctgtatttttagtagaaacggggtttcaccatgttggccaggctggtctcgagttcctgacctcaagtgatctgcctgcctcagcctcccagagtgctgggattacaggcgtgagccacagcgcccggcctgtaccattttgcattcccaccaacagtacccaggattttgcatgctttttgcccagggtcgatttaatgtcagtgcatccccggcactgcatccctgtctcctacttttcagcccttgtctgggttccttgatatcagggagtgcctaggtcattgtgctcattcgacagatgggaagatgagctctccagaggggaagggacctgttcaagaccccaggcctgattctcacagatctttcacttcacgctttgcttcctgagcaactgattcgggctctggcactccccggagtgccttcatcccatggcccacgcagttcttccaccgctcaccggggctatggttcctgtccccgcaggtccaacgagcgctcctccaagcggagccttggagggcacggccggcaccattacctccaacgagtggagctctcccacctcccctgaggggagcaccgtctctgggggcagtcaggcactggacaagcccatcgacaatgacgcagagggcgtgtggagcccggacattgagcagagtttccaggaggccctcgccatctacccgccctgtggcaggcgcaaaatcatcctgtcggacgagggcaagatgtatggtaaggagcccgtcgggttcagccctgtacctgaggctgaggcaaggggccgacaccagaaccttggggttcctgccgggccacggaaggggatgaccacttggggctttgtcgggtggacactgctttcttccctcctgggctcccaagggatgggggcatctgaggagaagcctgtgagggggtgtggagggtggggcccctggcggtgagcagaggtgggagtgggaatcttggaaaaggcgaatctgggtggggtagaacatccccccagagcaggtggggagcaccccacaagctgtaccccagcaggtgcctgaccagcaggctgcccaccttggctgtgaaggatgctcactcatcccctctttccctcattcactcactcattcatgcaacaaacagatgccaagccttctgtgtgcctggtgtgggttagacgggtctagtcccagcctgtcatctggggtgagggtaatgtgagctcacagatacctgctctgcaaggcagcctggagagctcctaggagaggcagagtgctggagaccactcccctaggaaaggccccccccaacccagcagagggtcaccagaaacggcttgatctttgtgagtggctggggttgcagaacacaatggaaactgttcagcactgcatgggaaggaccaagcagttggcatggggccacgatgacttttggatggaagagggggcatctggaaaaatgaagcaggggctgggcatggtggctcactcaagcctgtgattctagcactttgggaggccaaggtgggaggatcacttgaggccagcagtttgaaaccagcctgggcaacaaagcgagacaccatctctagtaaaaataaaaaaaattacccgggtttggtggtgctagcctgtagtgccagctactggggaggctgaggcagaaggatctcttgaggccaagaggtcaaggctgcattgagccatgattgcactgttgcactcctgcctgggtgccagagtgaggccctgtctcaaaaaaaaaaaaaaaatgaagcaagaataaaaacggaatggctgttggaaggcccagatcaggcttctgttcctgttggaaagtcctcaggaatcctagctcaaaacagcggtcttggggcaggagtgagagccctgagtgggtctctaagtggctgaagtcagtgacaacggggccccttcctggcttccaacaggatggccccagaccatctgcccacccccacgggtttccattcatttctcccccacacccaacgctggtgccacccccaccattgttgcttggctcggcttccccagggtcgcccttgcttctgggttggccctccagactgtccctgctttgaccacttcttgctctgatggttgcttggctcggcttccccagggtcgcccttacttctgggtcggccctccagactgtccctgctttgaccacttcttgctctgatggttgcttattttttcctttttcttttctttctctctcttttttttttttgagatggagcaactcttgttgcccaggctagagtgcagtgggcgcaatctcagctcaatgctacctctgcctcctgggttcaagcgattctcccacctcagcctgccgagtaagcttggattacaggcatgtgccaccactcctggctaattttgtatttttagtagagacagggtttttccatgttggtcaggctggtcttgaactccagacctcaggtgatccgcccaccttggcctcccaaagtgatgggattacaggtgtgagccaccgcacccagcttttcttttcttttcttttgtttttgagacagagtcttgctctgtcgcccaggctggagtgcagtggagcaatctcggctcactgcagcctccgccccgtgggttaaagtgattcttctgcttcaccctcccaagtagttgggtctacaggcgtgcgccaccacgcccagctgattttacaggtgtgagccaccatgcccggccttgcatctgtatttctaaataaagtacttgaatgtgtttgtggcagttaagataaaatttgtctttagcagatcccaaataacagtggcttacataggggaaatttccttctctctcctataaatgtctggagggtaggtagtccagggaaggtgtggcagctctgctccatgaagctctcagggacccaggatgcttctgtcttgtggctcatgagcatgccttccattgtgaatgttcccttaaggcccaagcagctgcttcagctccaggagttacattgcagctagcagacaggagaatgggatgaagaagagtgacctggatacatttaaggaagacactgggaaactaacccctgaaatatttactggccagaactcctgtgaagtcccttccacttctacttgtgaagttttgcttcttacttttagcgcctggggaagcatcatgggggagacagctgtgtgtggagcacctgggggtgcctggtgtggtgttgggtgctttgcagaggttgttgccatttagccaggagggacgcagcctctggaaccccccaggctctttcctctgctttggtggaggaggggatgggtatagattgtagcttaggtgtgaaatgagaaagggcagggggagtgtagggaagggcaggtggcttggctggggagctgtggtgtatgtcctggacccttcacagggcaggtctgtgtgctttagaggcagaggtgggccggaaaatgtaagtgtgcatgaggcatccagcaaggggcaagggcggagggcgctgtgggtgtctgggagggccctgtggagacgccagaatgcactaaatcaacagacatttgtggaattgagcacccctggggaccaagggcttaagggctttgaggacttgctttttgggtgtgtgtgtgtgtgtgtgtgtgttaaaaaatacgtaacattttccattttaatcattatagtttttcagtttataatttgatggcattaaatatattcacattgatgtacagccattactaccacccatcgccagaaatatttcatttcaaagtgaaattctttaccttttaaacaataattacctattctcgccatcctccccgccctccagccctggcaactgccgttctgctttctgtctttatgggtctgactcctttagttacctcatataagtggaatcatacaacatttgcccttttgtgactggctaatttcacttaacacaaggtcctcaacgtttatctgtattgtaacctaggtcagagtttccttcctttttaaggctgagtaatattccattgtatagaccacattctgtttatctgttcatctgccgacagacatttgggtggatgcttagttttatttagttgttataggtagatgtttctgtccctgcttcacatataaggatactggggttaagagaccgtgaccaagcctggggaagcgccaggctgtggatctctggcaggactggggttggaattctgtttggcaggagggaagccactgactcagggaagcagactgaaaacggtttggcaaactgtcctggccatgttggcatctcggatgctgctcctcccctgtgctgagacccagggaggggcatgggatggggacgctcgggagggcctggaggaagagtgaggaggggcagaggtgctgcttcactgtgcttcataacacgtcagcgctcccagcatcctgggcatccgtgatctttcggtcctttcaagggtcccttcaaggagggaggaatggcacctctgcttgcagatgcagaaatggaaattcagggaagccaagagtttctcccagtctctcaagttggaagtggagagtggggctttaacccagttctcctgcctccgagcttggcgttcctctgtcagctgaatggccttgctcctccactgcctggccctggctccaggtgggtcaggccctgggcagggccctggaggctgtactgcaggctctgacaaccgcccagcccccacagcacctgtcctgcatgagaataggttctgctgggatccagacacccgctcaccccgtctcttcttaccagtcccgggggccgagccaaggcaggactgcgtggggactgatggagggctctcagcaggcagcgctgaccagcccggctgggagctatagatagctctgagctcacccgcagtgtgtgggatgggccctctgggaggcggaatgggaggccgagctgagagctgactcagacctcagctcaccatggctgctcccctcctgtcttctcatcttcccttgggggatctgcgcttcccatcctctgtgtaccccagccccattctgagcccccagctgcttccagcatccccagagctctggtctattctccccgctcacttccctgcatccaaaggccaccagcccctttccaaatgggccggcccggtggggtacggggtggggctaagaggatgattcccgacctggggacccgggccttagctgtttgaggacaggagttaggctgctccgagctccgcccacggcacatccagcataggacacgctgaccaaggccaggcagacatgcagatgacatgcaaagcagcacggcagattaacacctgctatttctgagctgagtctcccacgcttgttggctccggccctccccttgagcacctcttaccctcctgggccggctccccagcccggggtgcttgcctgctcctgctcacggccgctttcatttctgccctgtcactgtgtgaccctccccctggcacagccaacgctggccacgctgacctcctttggccaggctcacagtcggcctagcctagcgtgcaggtggtgggactcgaacaacttcttgcccccttctgcctgctccccgccttccccgctcctcacactcagtgctggccgggtgggctcgcgtcccgcctcctgctctctggagggctgtggctggctctggggttccctctgcattcatccctttctgcctcctatgcttctcaccttcctgaggttgctcttgactttcccgagtcttcctgcctcttttccctgcctctctctctgcttctcccctcctgtgtcccaggtgggccatcctattagcagcccgtcagttctgattaagtgaccaccccccactgggcaggctgggctgaggccgtgtggtctctgctctccacgacttcatggtctaatgagaggggcaggaaaaacttctctggacagttagccacccaagcagacactggggttgtccacagccgatattaaccagatttatcttgggagttttcctgaaggaagcagagctgagggtgagtgcttgtcttggtctgttttctgttgttgataacagaatacctgaaactgggtaatttataaagaaggagtttattccttacagttacagaggctgggaagtccaaggttgaggggctgcatctgtgagggccttcgtgctggaggggactctgcagagtcccgaggtggtgtaggcatcccgtggcgagggggccgagtgtgcttgttcaggccttttcttcctctgagacagcccccagtcccactcctgcgctctgttagcctattaatccctgagtggattaatccatcgtgaaggcagtgccctcagggccatatcactccttaaaggcccacctgtcaatactgccagatggggattacatttcaacatgaattttggaggggactaatattcaaaccatagcagtgctccaggcaagggggtggagagattgtgagcatcagcctagaggcgagacttcacatggtgggtttgggggaccctggtggaggatcagggcaaagcactgttgattcctcagactgtcagaggtgaagggattccctcgttttctggatgagtcacacagctaataagaggcagaaccgggaccagactcaggctgagtttgggactagatagagcacgtcgagggtcttttcacaaaggtgatgggacagaggtcacggagtctcacctgggctcctgcccccgcttcttcaccatggcctcatttgcaggattctctgctcctctttgctttgttgccctgtgggtttccagctgctcctatgctcctccctatggcctgcaaccctgacttcaggtgcctggaggcttgatgacgggagtgttcaaatctactctgtccctgagagctggcgtgaccttgggcaagttatttaacctccttgggcttcattttccttttgtaaagtggaggtcataatactactacctttgtgggaggtgttttggtttatttattttattgtgagaaaaatatacattacgtaaaattaaccatttaagccatttttatgtgtacaggtcagtggcattaagtacattcacctttttgtgcaaccatcatcaccatccatttccggaacttttccatcatctcaaatagaaattctgtacccattaaacaataattccccattcccctctgcccctatagccgctggtaacctgttctattttctgtctctatgatttgcctattctaggcatttcataaaggtggaatcaagccagccgcggtggctcacgcctgtaatcccagcactttgggaggccgaggcgggtgaatcaagaggtcaggagtttgagaccagcctggccaacatggtgaaaccctgtcactactaaaaatacaaaattacaaaattagctgggtgtggtggtgtgcatctgtaatcccagctacttcaggggctgaggcaggagaattgcttgaacccgggaggcggaggtttcagtgagccgagatcatgccactgcactccagcctgggcaacaaagcgagactctgtctcaaaaaaaaaaaaaagtggaatcaggccaggcgtggtggctcatgtggcttatgcctgtaatcctagcactttgggaggccaaggcaggcagatccctcgaggtcaggagttcgagaccagcctgaccaacacagtgaaacccgtctctactaaaaatacaaaattacaaaattagctgggtgtggtgcgcacctgtaattagctactcgggaggctgagccacgagaattgcttgaacctgagaggtggaggttgcagtgagctgagatcatgccactgcactccatcctggatgacagagtgagactccatctcaaaaaaaaaaaaaaatgtaatcatacatatttcctcttttatgtctggcttatttcagttggcataatgtccttaagcttcatccatgttgtagcgtgtgtcagaatttccgtcttttttaagactaggtaatgttccattgtatggagagactgcatcttgcttatctgttcacctgtggatagacatttgtattgcttctaccttttgactactatgactaatactgcagtgaacattggtgtacaggtatcttgagtccctggtttcagttcttgtgggattggaattgctagctcatgtggtaattttatgtttgagtttttgaggaaccaccaaactgttttccacagcagctgtatcagtttacattcccgccagcaatgaacaaaggttctgatttcgcatatcctcatcaacgcttgttattttccattttttggatcatagccatcctagtgggtgtgaagcgctatctcgtggtttttgatttgcatttccctgatgattagtgttgtggagcatctttccatgaggttattggaataagacattgccttctagtgttgtagtagggatgagagcacacagtaggtgccaaatgcacagcacaggggtgaggggaacacgtacctgccctcaaggaactcacagtgtggcgggggagcatgactaggacggacactgaggcaggaatgggcatgccctcttgggtggggagcagtgcaagcttcttggggcttcctggagctgtggccttgaagcctggctgatttcaccagaagcctcagagccctccagggacaatggtaggaacagctcaaatgtcaggcccaattgctgccttctcaggcttcagtcagaagttccttctccacaaatagcctcctcctccagccccaggtgtttatggcttcagttgatccctggatagctgcacccccccacacacacaccccggcccccgcttccaggccattggggattagggtggggcagcgaggatgggcccagcctcctctccctgagccccaacctacaggggtgcagtgtggcacttgctcactccaccagaggcctacagtgaaccaaagatgtccacacacacttccacccactcttgggtggggaggcttgtgccctcagctcctcagtccttttcaagtttgaaagctaatagcattcattataatagggcttcgttaacaatattaacagtaatcgctgaccttgctggccctctgctgagtggtgcgtgctttacttactccatgccatttaacagtttatggtctagtgggtgggctgccatggagagaggggactcagcacagaggaaatgagatacagaaatgacctagcccaggcaggattttgcagctggggtaacgttttcagcggtgctatgtggcggaggtggccggcagggtgtgtgtgaggctgggtgtggggctaggagaaagcggagattcctcgtggacgctgcatcaggaatgctccaccctcagcctttaggccaaggctcctgtttctccacgggcagccttcgcccctggtggggtggggccgtgggtgtgagctgggggctgtcggacacatgtgctctgacagatggacagatgggcccacagtctggcaggggcgtccttcccatccccacccaggcctgccctggggttggccgaggccacctgccacgttgcaatgcgcagctgcctgactggcctcctccttccccagcctgtgttctcagccaccagagggggaagcctgcggttatgcagctaggggcagagctgggacaaggacaaggacaagcccctcccaccgccaccacctcagctgggtgctttacaagtttctcactgccatggcccttctttgccggctgtcactgtggttcccacgctctacctgtaggccgacgctccctactcccttcccctcttgcccctgactctgggggccttctggtgtctacatgatccaggatacgctggctcccaccagctgtgggtaccactgtccatgactggtgggcaggacctcaggtccaagtagttggatctccctccaggaccttacctcatgcagagacttaggaatcggggggattgatccaaagggaaggagcagcatcgtcccttgcggaggaagctcagccctgttgggggagcatatcctggggggaaatggccagcatgtaatactctcgaagcactggggacagccttggaaaacataccttctcgtggtgcctgggacactagcaagccatgagactgtgaataagtcatttcccctctctgggcttccatttcatcatcatcaggctaaacaggacctctagagtcacgtggtccagccctgcttctgagagaagtgacctccaattccctgttcattcggagtggtaccatgcagtagccacagatgggcactggcaccagactacatggacccgaatctcagccacatgcttgcctgcgaccctgagaaaatttctcaaccttgctgtttccatgtccatagcgtcgatgaaccctgaggaaatttctcagccttgctgtttccctgtccgtagcgtggatgacagtaccaccctcatttagctgttgtgaggatcgaaagggtgaatgcagataaagctgtcacaggatacatatccgtatccgcacagatacttgtactgatgaggtatgcagcaagtgttcattgtcattaacattttcacaggagtgacaggccacggcagctccctctgtgtgtaaagcctggattagatgccagctggcctggaggcagggagatggctgcgttgacctctagagcacccctggtggcaggaaggaagctgcttgggtccccttggctcacacacccacagacaccccacacttcactccctcacggggggttctcaactgccggcatctcccctgaccagcacaacgaggctggagggtctgagatgagccaaaaagggagaggaggaggaagctccacagacagccagggaaaagcacaactttaacaaatacaaacctggaggacagtatgccaagtgaaatataccagacgcagaacctggaggacagtatgccaagtgaaatataccagacgcagaaggacaaatgccgagagggctcacttagaggtggaatctaaaacagtggagctcacagcagcagagagtagaatggtggttactggaggctggggtgggcgtgacggggagatgttggtcaaagaatatagtttcagttagatggggaaatgtttttggtttctagtttttgtttttccgttttgtttgtttgttttagacaaggtcttactctctctccctggcagaagtgcagtggtgtgatcacagctcactgcagcctcaatctcctggtgaccctcctgcctcagcttcctgagtagttgggactacaggcatgtgctaccacgcctggctaattttttatttttatttttattatttttatttatttatttattttttttttttttttgagacagagtctcgctctatcgcccaggctggagtgcaatggtgcaatctcggctcactgcaagctctgcctcctgggttcacgccattctcctgcctcagcctcccgagtagctgggactacaggcgcccgccaccatgcccggctatattttttttgtatttttagtagagacggggtttcactgtgttagccaagatggtctcaatctcctgacctcgtgatccacctgccttgcccacccaaagtgctggaattataggcgtgagccaccgcacccagacttatttttatttttttgtagagatggagtgggtttcactatgttgcccaggctgatcttgaattcctgggcttgggcgatcttcctgcctcaggctcccaaagtgctgggattataggtgtgagtcatgacgcccagtcaaggaggaatgtttttggagacctattgcccagcatggtgactgtagcgaataataacatattgcatttttcataagttgctaagaaagtaaatttcatgttctcatcatgaaaaatgataagtatttgaaatgatggatatgctaattatttgattcaatcattgcacgttatatacgtatatcataacatcactttgtaccccataaatacaggttgagcatcccaaatctgaaaattcaaaatctgaaatactccaaagttcgaaactttttgagatgtgcgccttgaaggagatgctcgttggaccgttttggatttcggattttaggattagggatgctcagctggcaagtatatagtgcagatagcccccaaatttgaaaaaaaccccaaatctggaacacttctggtttcaagcattttagataagggctagtcaaccagaatgtacagtttaaaaaaagaaagaaaagccaggcgtggtggctcacacctgtaatcccagcactttgggaggctgaggtgggcagatcacctgaggttgggagttcgagaccagcctgaccaacatggagaaaccttgtctctactaaaactacaaaattagctggacgttgcctgtaatcccaactacttgggaggctgaggcaggagaatcacttgaacctgggaggcggaggttgtggtgagccaaaatcgcgccatttcactccagcctaggcaacagagcgaaactccatctcaaaaaaatgaaaaataaaaataaacaaaaatagaagaaagaaaaaaaaaacaaagatgggccgggtgtggtggctgatgcctgtaatcccagcacttttggaggctgagatgggcagattacttgaggtcaggggttcgagaccagcctggccaacatggtaaaacctgtctctactaaaaataacaaaaattagccaggtgtgctggtgtgcgcctgtaatcccagctacttgggaggctgaggtgggagaatcactggaacccgggaggtggaggttgcggtaagccgagatcacaccaactgcactccagcctgggcgacagcgagactccctctcaaaacaaaacaaaacaaaacaaaaagaagacggctgagcttgccttagacccttggtgtggctcctgtcccgccccattactagcctctcgcccggggctgagacggcctttctagcagcagagccctggaaccttgtggcagagggtgagggtagttgtggggtggtgggcaggggctccttgcagaggctgagtcctctgtgatgtttggggttagggtctcagctgatgggggccaaggcctccctactgcttctcaccacaggctgcagaggaagcagcactgttacggggcagtcctgcctgatgagaggaggttccattaactaagcatccttgcttggccaggcctcgggccatattcaagcacctgagccaagagtcacacctgggcagttagtcctaggtctgctgtgggtgatctggtgcagttctctggcaaataggtataattacctgcccattgcagggaggaggtggatttactgtgaagttaatgaggtttacgcgttaggacccagcacttacatgggccccttccaagtccctaaacttaatttttgcttcattgaagtgtaactgacattacaacaaactgtacatgcttaaagtggccaagctgatacattttgacagatgtatgcacctgtgaagccatcaccaccatcaagataatgaatatgtccattgcccccaagtttttaacctaattttgtatttttaaaattctttttcccaaagggagcctcccaattgctaaatgtcttaggcctcacaaaagtctgggtttgctcatgtacagaaaagttcaatgagaccaggataggacacgccttaaaagttacgttggactaatcagaagtaaaaggttatttgcatgtatttaacttacccctttgtcttagaaggctaaaacagttacgggacatctgaccagcatcttagcattcattccctcatcattcaggcagcaagtatttattgagcgcctacaatgtgcaggcagttttctaggtggtgggtataaataagtgaataaatagaccaaaaatccctatttgcatggactgtggttctgacgggggtgagggcacagacagtactcaaataagttagattatgtattatgctagaaggtgctgtggagaaaagtaaaggcagtgggtgccagggtgggcgggtaggagtatgatttcaaccctcagtggggtggtcagggaagagacagtggcacccaaggggtgcaggtggtgtgggactctggggcagagtgttccctggaggagaaacaggaagcacaaggaccatagtggggcaggtgtgggcctggtgtgtttcaggacagcaagaagtttaggatggatcgggtagactagatcagagaggtgactgaactggggtggccagatcctgcaggggtttccaggccattgtaaggacttggacactgttaatctggggcagatggaagccattggagggcttttgaatttcgatagggtcgctgcagctgctgtgttgagcatggacttggagcagggaatacaggtggaaggtgatgatcctaatccaagtcagagatggcgggagcttggaccctgtagggtgcggtggtgcacagtggctgtatgaattctggatgtgttttggaggtagagccacaccagactcattcattcattcagtgagtaggtgccaggtactggagatgcagacttgaatggaggcatagtctcttcctctgagctgttgagagtctaacaaggaaagacagacacggataactgatgagcacacgatatcctgtgtgcaagggacaggccagaggagcaaccaagaaccgtatcccagatggtctgccatccccatccctcctgctacactgtcacccacttcgcagctcttgggaacctctcttcctccctcatgcttttccttgcccgtagactagtctctgagctgggttacttacttgggcctagagcatgttcattttacagaaaaggaaactgagccacagagtgttctcactgagccagcgttgaggtctatttcctatatctgtagaaatttggaagaatctgcgggaaaaaccttaaaggaactagatttaagaagagacggctgggctgggtgcagtggctcacgcctgtaatcccagcactttgggaggctgatgcgggtggatcacttgaggtcaggagttcgagaccagcctggccaacatggtgaaactctgcctctacttaaaatacaaaaaattagctgggcatggtggtacacacctgtaatcccagctacttgggaggctgaggcaggagaatcgcttgaacctgggaggcggaggttgcagtgagccgagatcgtgccattgcacgccagcctgggggacaagagcgaaacttcgtctaaaaaaaataaaataaaataaaaagataaaaaagaagagaaggctgagtgaaagtccttaaagggaagagacttaccgtgctcccaaagctcattggtggagctgccaggctctagcctggctcaccagctcccaggtctgtggccctacttcattcacccaccggtgatgacttagacccgagatgctgcatgggtggctttagttagacctggggtagaactgtcgaccgttcactggaccgccaaagcctttccctagaaagctttgagaggagacatcttgtggactcagggtttcaggtgcagatcagaccacagacagtgtccccagactccaattctcccccgactccttcctctgacacagacgaggcagtggtcccaggccagctcaccttttctggcagacctctggagagtagcctcttaattcggccttggcactggggaaaggtcagctcgggggtcagcttggccttggccgtgcactctggttacaacccaggtggcaggcagcccactcccctcacctccccgggcatcagcagctgcctcccacggacagccgcaagccctcccggttccgcagcacagggcgggctggcacctgctccctctgatccccccactcaaaccctcttgctctgcctctcctcatccgatgcttctccgtatggtctaacactagccaggggtgaagggccacccaagggcttgcctgaccacccagcctgaactggcccccggtcctctgaacacgtccctgtccgtagcaccggtggattccattgtgtgggcacatgctgctcctgaactaggtaatgctttgaaataaggaagccctttccatcatctttttcaatactggaaaccatggatgctctggggttttccaggttgcttcaggcactgcagcagtccctcgggggctgggcccatggggagtgctcaaccttccttgttgaggggtctgagtcagccatggggctgcacatgtgcactgactggcttttctttatgagcggacgggctcaggcctcctctccagggacactaagtgtctccagcagttgcacccccccatgcccgctgctgcctgcagacaggacaagaagtctggacgctcctactcatttacagaggcggagggcacggtggcagtcacacagggcaaggccgagggccgggcagctccctggagcctcccaagtgtgaagaaggcccaggagaaagtgtggggagaggagaggaggccgccagcgctgggtgaggaacggtgccgggggtcaagggaggctctggaagttcctcaggctgtgcgtgttggtggccacggaccctgctaaccttgttctcgggtttcagtccccacagtgaggccttgtcttcctctcgctgctgggagatccctgtgatccagagagggaacccacagaatcctcaccccacaaatccgcttaggatgggcagagagtgagggcagggctcctccgtagagggtaccccgcaccccctcactgcttccagccttttgtccttctgtccactgagaggctgctggtgtctccgcaggtcggaacgagctgattgcccgctacatcaagctccggacagggaagacccgcaccaggaagcaggtgggcctcaagagacgggtaggggtcccgggggtggtaccccagcaccagcctgctcccaaggtgggccaggccctcccaggaccagacgcaggcttttgaggggcggcagctctggatgagttatccctgttgggcgtgtcacgggtggtccagttttctttttcttttttttttctgagacggggtttcattcatgttacccagactggagtgcaatgacgtgatctcggctcaccgcaggatctcggctcctcctgggttcaagtgattctcctgcctcagcctaccgagtagctggggttatagtcacctgccacaatgcccggctaattttttgtatttttagtagagacggggtttcaccacattggccaggctggtctcgaattcctgacctcatgtaatccacccgccttggcctcccagagtggtgggattacaggcatgagccgccacacctggccgggtgatacagttttcttggggtccctgctgccatcacttaggaggaaacccctcgcctctctggagagtcatcagcccccatctcatccttctccaggacagtaggacagacagtaaaacattggcactacttttcttttttgttgttgttgagacagagtcctgctctgttgcccagggtggagtgcagtggcgcaatctcaactcactgcaacctccgcttcccgggttcaagcaattctcctacctcagccttctgagtagctgggattacaggaatgcgccaccacgcccagctaatttttgtatttttagtaaaaatggagtttcactatgttggcgaggctggtctcaaactcctgacctcaagtgatccacctgccttggcctcccagagtgttgggattacaggtgtgagccactgctccctgccggcactgcacttctgaaatattgctggcttctggattagctgggcaaggcaggactgaggccccaccagttgaccctttcattcattcattcatttggtccacagatgtgggttgagggctgtggagggcgagagtcaggaagccaggctggggaacacaggttgttgggaggtagagacaggagccctctctccctgccacaggtctccagccacatccaggtgctggctcgtcgcaaagctcgcgagatccaggccaagctaaaggtaaggaaactgcagtgggggtgctggagtggccaggagtggtggccagcagcatgtcttccctttggggtcagggcatcgctgctggtgtgcaagtcagtgtgcttctctctgttgaggagagccaggttgggcctgtaacctctctcccatccgcacaagagggccaagtgtgtggatgcctggctccccacaccctgggagctagaggccaggctcctgctgggatccccccttgctggctcctgcttagaggggctcacacggctcagagcagccggatcacccgccagccctcatttcttgagggcccctcagtgccctcgactagaacatgcgcagtggcaggggcatgggggggcgcctgctgtgggggtgggggtggcgtttatggtactgtgggagctggggaattccttcctgcttcctgtcctgtgggactgggggttccttcccttccctgggtcagccccatcttgcagggcctctgctgataggtgacggccctggggggcctgatgttgctggcattcccctcggggtagccctgctccccacaggagtcaggcctctgggaccctggaaccaggggcctttgggtgaacactgggagggagtgagctctccatcagggaggtgatgacgacagaggctgcacagccagttggtgggaagatctgacatttgaggcattaagtctagaccatttataaacatttttatttatttatttttagagacaggatctgtctctgtcacccacgctcagtgcagtgacgcagtcatagctcactgcagcctcgacctcataagctccaatcacactcccacctcagcctcctgagtatctgggaccacaggcaagtgccactgcacggccatttttttctatttttttatagagacgaggtctccctattttgcctgagtgggtcataaacccctgggctcaagagatcttcctgccttggcctctcaaagtgctgtaataataggcatgagccactgggcctcgcctgcaaacattttttttttttttaaaagcaatgtagccccttttctttttttcccccaacaaaatatcaccctgatgtgttaccagaggagccgttcttgtcaaagctcctctcctcccacgaatcctttcccaccccttggaacttgaactctagggacctcagaacccagtttaaaagctactgggaggccaggcgcagtggctcatgcctgtaagcactttgggaggccgaggtgggcagatcacttgaggtcaggagttcaagaccagcctggccaacatggtgaaaccctgtctctactaaaaatataaaaattagccaggtgtggtggcgcacacctgtaatcccagctactcgggaggctgaggcaggagaattgcttgaacctgggaagtggaggtcgcagtgggccaagatagtgccactgcactccagcctgggcaacagagtgagactccatctcaaaaaaggccactgggctagctgggcatgcacgcctataatcccagctacttggaggttgaggccaggagttggaggctgcggtgagctgtgattgcacctgtgactggccacttcagcctgggcaacattgtgagaccccatctctaaaaatattttttatattaaagaaaagccactgaattagatgaccttgaaagtcccatctggccctggcagttcatgatcctgacactggaatctcagaacgagtgggtgggaaccacagacctttctgcctcctaggaagccacaccccactgcccactcagttccattcctcctgccatcagcccagctgttccccgagccccacagctgtggcctggcacctcgctcctttttccctgggacagctgaccagccctcagctgttgctccctgcctctcagcctcagctcccacagccatggagcccagccctgctccctgtttcccctctttcatctgcctctgactcaccgggaccctgcagatgaccacggtgaacagacttcccactactgggtttagggcaatcccttgggggccggctgtgtggcccacatttgcttcagggaattgtacttgtccttgtccacaggttcagacctggggcccaaggacagccttcagtggatggctggacagacaccaaggggagccataaactccataaaatatgcaaattttcatgtatatgtgagttgccttggagagattgctgtgaggattttgtcatattctcaaaggatctagaacccaaagtgattaagctctgggttggacagtgatccagtagaaatccctgagtgagaggctgggtcctaggcctggatttgccccgtggccgtgagtgcttgggcagagtcactgggacctcctggtgctccagtttcctcatctgtaaagtgacaggcgagcaaggtgacatccaagttcccctcccggccccggttagtggctccgtggctccattgcccggctactgctgtcactccccatcaggtccttcccacttcctctgacccctgccccaccctgcccaggccgcagtttcctgagccccagccgtttgtttagatcgagtatccaggaaggcaggcactgagcagatgcagccccggcctcgtgatggagttgttaagtgccgaggtctgcgggctcgcaggggtgtgcctgccaagtccctcatgccctcctgcggggagaggttgggggctggcctgggcactttcctcctgaaaattccaagtgtcttgggaggagacacacacttagacttactagttagctccctctttggttatcagagacaacctctgagagcaaagtccaagtttggccccaaaaggacagtggggagggggccaggaggggccagggacaaacctcatctatttcactgctttgtccacattgacaatggcccactactcagaacagttccccactccccaccgccctctatggtgcatctcccccgaccccttggtttgcatggccccccgtgtgccagtctggtccaagctcacctggtcaccatcaccactctcagcaccctagtcacccaaattctcagagcctcagtttcttcatcttaatgatcctacgagtcctgtcagtctcacaggactcagtgaggttgtgttcttgaaaaccttccgtgggctgcctcatgccacatgggtgaaatggtcaccttgagaggatgagtggaagggcctgctgtgttctggcttcacacctgcacggcaccaggatggcgggggagcactgagcctccctgagcctccgggccgcggtgctgcccacctcatggagctgcgtgtggaccgcgtggaggcatccctgggaagagctggcgagctgcagggctcaccgttgcttctcaacttctgtttttagtttgtgttttagagactccactctgtcgcccaggctggagtgcagtagtgctgtcacagctcactgcagcctcgacctcctgggctgaggccatcctcctgcctcagcctcccaagtagttgggaggttctcaacctttgtatcacttaagggagatccaggtctaccaagttaattattattagttattcaataatggttttatctttgtcattaaaaaaaaattcatggctgggggtggtggctcatgcctataatcccagcactgggaggtcgaggcaggaggatcacatgaagccaggcgtttgaggccagcctgggctaatgagatgctgtctgaaaaaataataataatcataaagatatttatttatttatttagacagattcttgctccgttgcccaggctggagtgtagtggtataatctcagctcactgcagcccctgcttcccaggtttaagcaatcctcccacctcagctccttgagtagcttggcctgcaggcacacaccaccacacctggctaatttttgtattttttgtagagccagggtttcgccaagttgcccaggctggcctagaactcctgggctcaagcgatctaccaacctcagcctctccaggagctgggattacaggcatgaaccaccgcttctggccagatatcaaatttctaatcagagcccctgagttgactcagtcgagccatttagccccgataaagctgcagacagtgaataatacttgctgttccagcccgtgtgtgtgtggtcttattttggataatccctgctgggtacagtaacgcatgcccgtggtcccagctactcaggaggctgagatgggcggatcatttgagcccaggagtttgaggctgtagtgagccatgattgtgcagtactctagcctgtgcgacagagtgagaccctgtctctggaaaaaaaaaaaaaagaagaagaaaaagatacaatttccattaggcttcttgaaatagggaatgttgtgtcattggttttgaagacctttggaattcgggcactcaggatggaaaccactgccttacatgaatataacaaacgattactattgttacccgtgccatccaagtggctttccctgtgtgcttatttgttccgggcctattcagggtgaacccatcctctgaggtcctggaacctttggagggcagacagtgggtatttacattctgacacgtgaaagatgggtgagtcccaggtgcctgcagtgcccagggagatccttagggcaggactgaggcaggaggggccacaggagatggtctcttgcctccagacagcccgtgtggccagggatgatgttcctgtgcactcgaggagggatccagcagatattcatgcatcgttttcacaagacaggtgctgagctaggcacctgtggtagagaggtgagcaaggcatagaaggtggccccataattaataaaatgacagataatgtctctgtaagctctgatgaaagaagcagggcaagtatcatgcccctttgacagatgagaaaactgaccagagaaaccagctgactttctcagttgcaaaacaagttaatagcacggcacagacttaacacctggtcccccagctctggccactggcagcgagacagcttccctgacccgagggccagacctgcctggcctcagcctgactagtgaccctgctgaggtcctcccttgcaatgtctcccccaggaccaggcagctaaggacaaggccctgcagagcatggctgccatgtcgtctgcacagatcatctccgccacggccttccacagtagcatggccctcgcccggggccccggccgcccagcagtctcaggggtaagtgggctgccgagagctggaggccaggccagccctctcctcctccctcctccctgttcagaagagccagaagcattggccagcccagatttctctcacctgagtcctcttggccagggcagtcagggaaggagggaacaaggacccaagggccacacacgtcccggcttggctggtattgggacggctttcttggggtcctcggcaatgactccacagacttcacaagggggaagggggagcttccaggagctgaccacctggtagctctgccaagttggcctaatttacagatgaggaagctgaagccaagggggctgaactgaagcctgagaccagcatgtacctgggcagctcgtgccacacagcctcatttctgccctcctgccaggtggagagctggtgccccaaaaacaaacccctggtcagattttaactttcccagccatgaccatgttggccacactctcagaatgatccagaaaggccccttttcagagctgtctcctcacaggggctttcttggctccagggactaaatgagtcttcaaggcacctgcagcaccgccctaggcacgtggggaaggggcagtgccaggccacagcatttttcaaagtgcgtcccagagagcactagtccatctgcatgttaaacagataggacacagtggttctgtgagtaagtttgggacccttggcattaagtgggttcttggcactgggacttttctgagccttaggtctgcactgtgactctgcgggggttgccctgtgccgtgtggaccacacctgggtgcttttcccatggagcccctcatccacagggcctgagagtcccctgaaactcactctgggggtgctgctgtggcctgttagcattcactagctaggcgaggcctcgggctgcagcctctcctcccagtggaggccctgcccggtcccaaccccacccccacgccacagggccccgggtgcacctggggctgtgctgattccatgccttttgcctcctcagttttggcaaggagctttgccaggccaagccggaacgtcccatgagtgagtatggcctctggtttctcttgccagttgctccctgaactgaacttgaacccataaactcatgacattaagcctgggccccagggtgtgctggggccgctgctggggtcggcctttcaggatggctctgagctcagggattgggctctcctactgtcagccatcactgggctcatctgtgatgtccacaccctagggtggtatttgccaaaactccagtctgtccagggtataggcagggccagagttggggtcccccaggggaggaggctgggaagcagacctctggctggcctgggaggaggagagggaggggtggatttcttcatcagacacgctgtgtctgtggacccgccacgaaacccaggggagtcggcaggggcgggagtaggaggccaaggcccatcaggaccactgaaatccagaccaccaggacctaccacacagagaccactggacccagtgcagggatccggggcggcggcctgcccgaggctgacacctcccctcctgtctctcccgcagtgtgaagcctttctctcagcaaacctatgctgtccaaaatccgctgcctctgccaggtgggtggcgctgcgggccccctttctatcgcagccatgtggctcctgcctctgggcccaggcccccagcagccaaacgcctgcgtgtccctcttcgatgctgccccgtcatgcactctgaccacacgtcctagtccctggccacaccgcattccttgcccccagcatgcacacctcagccgtgtgccaagccccttcatgcccctcgggttgccttgctcctgtctcctcgaagctgtgctcagggcttgtggggcacgtgcagttccaagggcagtgcctgtgccctggcggctgccccacttggccggccttgttactgcagtgtgcctcacacacctggtcctgggagggccaaggggtgtctagctcaccagcctggggcccctcccaagaagagggacccttgtgggagaagacctggtggaggcagccagcggtgctgacaggagcccccaccccgccctctcactgacaggctctgctctgtcctcgcctctttctcaggaggggccctcaccacctcccactctgtaggacaagaccagctcctcactcttaaactgccctttctggtgtggagtctgcctgcccggccccttggctttccctgccaccaagagcagccctgctgccttctgccccccaggtcctgaaggctgctttctctcgttcacacatcaaaacaaagtcacagtgtcaggtcccgtccaccctctgtctcatgccagtcttctgtccacactgaccgtgtcttcactccaggcctgctggcttttgcctgcgttcctgcagcggcctcttcaccggctcgctgtctcgtctcacctcctctcgtcaccctgtcactcaccagagcttcagtctcacggtgttgcttccaggtttatggtgccttcctggccccctggtgccttcaggacacgatctaaactacagtaggactggagtaggttcatctgttagcaacgctggattgagaggctcttctgggccaggccctgttctgggagcgggggagacacatgtgatgcaaacaggaaacgtccctgtctctccgggatgatgccatattgtaatagcggattcatctggttatttccccgactggaacagaagttgcttgagggcaggaacttaacagtgcctgttctggaagcctctatgtcccgcagggccccagctgccctccagaatccagtcttgctcggcggttccatgcagagtgctgagtggcccgagttgtaccaggcgagcccctccccaccagggcagctccaggatgccctggcccaagcctggcactccctccaccacctctgataggaggtccatttagggagacaggtggtcccccaggcagcacgtgtctgtccgaggaggcctggggtccttgcagagggtgcgggcagggcgggtgtccgtgaccaggttccatgtgcctttctcactttctgcagggtttgagtctcctgcagggcctgccccatcgccctctgcgcccccggcacccccatggcagggccgcagcgtggccagctccaagctctggatgttggagttctctgccttcctggagcagcagcaggacccggacacggtaggtcctggcctctgcctgtccagctccctggtcaccccctctccctctgtttctgcttccggcagtcttgccccactccaggctggggcttaattcagttccctgttcctttccgatattcccttctgcccttccccccactcctcctttcctccttcacgtcacccctcttccctctttccctcctccctggcttcctttccgtgtcccagcgcccagtcagcgtcacgctcctccctccctgtcctgtgttcctcctcccctcctaacccaaccgacgcttagtccaaggttgctctggtcccagccccacccctacactgtcccagcctctctctggctctgagaagcgggcaggaagctgaggagtctcctgtgtctgctccatatcctatgggataccagcctgtccccttcggtgtccagtgtcctgggtgaccagcgtcacctgcagaggtcagagggggacctggaggaggccaaggtgacaggatgccagggcccttctcactctgacatcttcaaacttcttcttctttttttttttttttttccttgagacagagcctcactctgtcacccaggctgggagtgcagtggcatgatctcagcttactgcaacctccacttcctgagttcaagcaactctcccgccttagcctctggagtagctgggattacaggtgcctgccaccacacctggctaatttttgtatttttagtagagactgggtttcaccatgttgtccaggctggtcttgaactcctgacctccagtgatccacccacttcggcctcccaaagtgctgggatcacaggtgtgagccgccgcgcccggctcagacttctttttagctgaggaacccatgaaccaaatagacctttacttagaagtccaggatgtaaaacaaaaggagtagacttttaccatctccattttactcatggggaaactgtggcccagaaaggccaagcggcttgcaccaggtcacgtggtgggcgcgcagagccggggttgtctgtctgaccgtctggcctgtgctccgtctccctcagacccactctctccacagtacaacaagcacctgttcgtgcacattggccagtccagcccaagctacagcgacccctacctcgaagccgtggacatccgccaaatctatgacaaattcccggagaaaaagggtggactcaaggatctcttcgaacggggaccctccaatgccttttttcttgtgaagttctgggtaagcctgggataaacccttccttcctgccaccagcgtgtccgtggtagtgagaacggggcgagagtgcccagagtgtgcccttgccacggtagaaacttggggaggtggcaccagtgagaaggggagagtaagcccagcatggctgtgggatggtcggagctgagccgaggagcggggcggtgatcccagagagctggcctagtcgaacgaggccttgtctcacgggtggggatggcagctaagcccggctagcagtggagccctcaggaggtgaggaggtgtagttccagaaaaagacaaacgggaccctgcggggataagtgaagacatgactaggagcgcccttgtcacccaggtctttgaatgacaagtcctgcatgggtttccgggcctggagctggtccttcggtgctcgtgtccaaggcatgttgggctgaacagagcttggagaaggggagggaagtgttggatgggtcacccagctgactctgctccagggcgaggccaccccacaagaaacacccacccagcttctcagatagctcagcctgtagacttggcctctgctgccctcccacctcaccccgggcaggtattttgtgggtggaacctcctccattgaaacgtcttgtctgaggccgggaggtacagtagctgctctgggagcttagcttcctgggggcccagtgtgtgcagaaaaggggtgcgaggagagagtcagacaggtaagtgctaatgaagccagcggtgaggaagggcaggaaatcaggctctgtgactgaggcctcgaatattctcaggacacggactgaggcttgggcggctctgcccgcattcctcttccccactccccttcagctctcctcacgctcttttcaatgcctcttgtgcggagattcttaccctttatttactcccagaccactttcataatctgaaagctttacttttcctagaaagaggcatattcacaccaaagtttatatagatgttcagatggcttgccggctcccagtgagcagctcccagcctggctctcatccacagctgaacttgggggcaggctgtctccagaaggggcaagtgttggaactgagacctagggcccctgacctttaagacacttagcatttgcgctctgccagcggaatggaagttggaccctggcctgagggatgggcacatctattggcagagatgggaaaggctgttgcggcctgggagtgcatgagtagtaaaggcagaaggaggtgggctctggagtgaagttgaagccgtgggtaaagagggaataagaggagacaactgggaaagtgagttagattctggaaggtcttgatcatactaaagtttgagttttaacctgttctggaatgaaaaataagtagtattttattttacttggtcttctttttaaatcaatgcatgttcatggttaaaatgttaattaataccaggaggcttatttaacgaaagagaatgaagggccagttgcggtggctcatgcctgtaatcccacacctttgggaggntgannnnnncnnatnncnangncaggagttcaagaacagcttgaccaacatggtgaaaccctatctctacttaaaaaaaaaaaaaaaattagacaggcgtggtggcacacgcctgtaatcccacctactcaagaggctgaggcaggagtaatcacttgcacatgggaggnnnnnnnnnnnnnnnnnnnnnnnnnnnnnnnnnnnnnnnnnnnnnnnnnnnnnnnnnnnnnnnnnnnnnnnnnnnnnnnnnnnnnnnnnnnnnnnnnnnnnnnnnnnnnnnnnnnnnnnnnnnnnnnnnnnnnnnnnnnnnnnnnnnnnnnnnnnnnnnnnnnnnnnnnnnnnnnnnnnnnnnnnnnnnnnnnnnnnnnnnnnnnnnnnnnnnnnnnnnnnnnnnnnnnnnnnnnnnnnnnnnnnnnnnnnnnnnnnnnnnnnnnnnnnnnnnnnnnnnnnnnnnnnnnnnnnnnnnnnnnnnnnnnnnnnnnnnnnnnnnnnnnnnnnnnnnnnnnnnnnnnnnnnnnnnnnnnnnnnnnnnnnnnnnnnnnnnnnnnnnnnnnnnnnnnnnnnnnnnnnnnnnnnnnnnnnnnnnnnnnnnnnnnnnnnnnnnnnnnnnnnnnnnnnnnnnnnnnnnnnnnnnnnnnnnnnnnnnnnnnnnnnnnnnnnnnnnnnnnnnnnnnnnnnnnnnnnnnnnnnnnnnnnnnnnnnnnnnnnnnnnnnnnnnnnnnnnnnnnnnnnnnnnnnnnnnnnnnnnnnnnnnnnnnnnnnnnnnnnnnnnnnnnnnnnnnnnnnnnnnnnnnnnnnnnnnnnnnnnnnnnnnnnnnnnnnnnnnnnnnnnnnnnnnnnnnnnnnnnnnnnnnnnnnnnnnnnnnnnnnnnnnnnnnnnnnnnnnnnnnnnnnnnnnnnnnnnnnnnnnnnnnnnnnnnnnnnnnnnnnnnnnnnnnnnnnnnnnnnnnnnnnnnnnnnnnnnnnnnnnnnnnnnnnnnnnnnnnnnnnnnnnnnnnnnnnnnnnnnnnnnnnnnnnnnnnnnnnnnnnnnnnnnnnnnnnnnnnnnnnnnnnnnnnnnnnnnnnnnnnnnnnnnnnnnnnnnnnnnnnnnnnnnnnnnnnnnnnnnnnnnnnnnnnnnnnnnnnnnnnnnnnnnnnnnnnnnnnnnnnnnnnnnnnnnnnnnnnnnnnnnnnnnnnnnnnnnnnnnnnnnnnnnnnnnnnnnnnnnnnnnnnnnnnnnnnnnnnnnnnnnnnnnnnnnnnnnnnnnnnnnnnnnnnnnnnnnnnnnnnnnnnnnnnnnnnnnnnnnnnnnnnnnnnnnnnnnnnnnnnnnnnnnnnnnnnnnnncagcctggtcttgaactcctgacctcaggcgatctgcccacctcagcctcccagtgctgggattacaggtgtgagccactgcgcccggcctgaggatgttattctctaggcttgccctacagttgtcatcctgagcctcccctatattgatacaatttcctagctcttgcatttctctctttattggtataaccccttcattttgtgggaacacatcctctagtaccttctaagaaaagatgcgtggtacataaatgaccttgcttctttgaaatgtcattatttttattatatccttatacttgactgattggtattggtagtctgggtaaagaatctagatcatacatcattttccctagaaaatgatgacttttttttttctgagacagggtcttgtttcgagatggagtttcgctctgttgcctagtctggagtgcagtggcgcaatcttggcttattgcaacctccacctcccaggttcaagcaattctcatgcctcacccttgcaagtagctgggattacaggcgtgtgccaccaggcctggataatttttgtatttttaagagagatgggatttttcagtgttggccaggctggtcttgaactcctggtctcaagtgatcctcccgcctcggccttccaaagtgctgggattacaggtatgagctatcgtgcctggcctagaaatgattttcgaggatcattctttagtgcatttgtcattatcttctgacataaatagtctgatagcattctaattccctatcctttattatgtaacttttttttttcctctggaagttgtaatatttattctttctccctaatggccagtttcacattggtgagctttgggatatgtgttgttttacttccccgtcttgagccaggtacttggtaggcacttttaactgtgagatgagtctttcagttttaggaaatttactcgtattatttctttgataatttatttccctcttctgttttcttttccaggaatctctgttatgatgttggaaccctctatgatgtttaccatttctttattttcttggacttatcctctacgatttttaccatttattttcaatcttggtctgttttcttagcgatttccttaattttgtattctaactcttttctgaattagttaaggttgtgtccaagtgcatatcacacaaaccccaaagaaacagtggcataaatagtttttctttcacatcaaggaagtctggaggtaaagactgtccagcgctggcccagtgctcctgacatcatgagggacctggcttctctctatctgctgtcctcagtgtatgacttctgtactcagggtcatgactgctggagttccagccactgtagccatcttccaaccatcaaaagaagccagtttagctccctgtaaggggcctgctgggaagccccataattagttgtgtggctgcatcttgccgtaaggaaccagggaaaggtacttttttagttgggtaagttgctgttctgaataaaatcagagctgtaatactgtagaagaagctgcatacatccttttatggatgtatcttagttcagttgatgacattttgttttttctgggtagtttataaagtgtgcatcctacagttacgggtgaattagatgagtggaatacagcagcatctctgccacaccttctgttgaatatttaatttcggctctgacattttaattttccagagctccttcttgttctgtgattgcatcaagatgtttgatggatgtagtttttctcctctttttcttaaaggtatgaagtaagcgttatttcttaagttttctcctgctcctaaccctccccccacccacaccgagactaagtcttgctgtgttgcccaggttggagtgcagtggtgtgatctcggctcactgcaacctccgcctccctgttcaagcaattctcctgcctcagcctcccaagtagctgggattacaggtgcccgccaccacgcttggctaatttttgtatttttagtagagagaggggtttcgctatgttggccaggctggtctcgaactcctgacctcaagtgatcgatttacaggcgtgagccaccacacccagcttcctgctcctttctttgtctttgtttctttttaattccgtttttctgtttgttttggtccttgtctttccagctggagggttttctttggtgtctttagttcttagctgcctgtctgtatttttttaacagctttcttgcagtgtaattaacttaccttacagttcacctacttaaaacatacaggccacgcacagtggctcacatcttaatcccagcagtttgggaggccgaagcagacagattgcttgagctcaggagtttgagaccagcctgggcacatgacaaaaacctgtctccacaaaaataatacaaaaattagtcaggcgtgatggcatgtgccagtaacccctacactttgggaggacgaggcaggtggattgcctgactgcatgagttggggaccagcttggccaacacggcaaaaccccatctctcctaaaaataccaaaattagccgggcatggtggtgcgtgcctgtaatccaagctactcaggtggctgagatgggaagatcgcttgagcctgggaggcagaggttgtagtaagctgagatcacaccactgcactgcagcctgggtgacagagcaagatcccatctcaaaaaataaagtatacaattccgagtttttaagtatattcacaaagttatgcaaccatcaccacaatcaattttagaacattttcatcatcccgaaaataagccctgttccctttagctgtcactccccactcccaccccccagccctgtgcaataatctaccttctgtctttgaagctttgcctattctggacattttgtataaaagggtttgtggaggatgtggtcttttgtgactggcttcttgaacttggcatagtgttttcaaggttcagccatgttgtagcacgcacgttcctttttatggccaaatgcttccttgtacggagagtccacattgtttatccattcatcagttcatgggcatttgggttgtctcctcctcttggctgttaggagtagtgctactgtgaacattacgtaccagtgtttgtgtggacattcattttcatttccatatgcttacgtctggaattactgggtcatatggcaactctctttcactttctgaggcactcccaagagtcttccgaagtggctgcaccgttttctgttcctacctccagggtatgagggtatgaggatcctattttctccacatcctcaccaacacttgatattctctgattgtagccatcctagcaaatgtgaagtggtatctcattgtggtttttatctgcatttccctgatgactgatgatggtaagcatcttttcatgtgcttactggccattcgtatatcttctttgtagaaatgccaattcagaaatttaggtccattgccctttttttttttgagacagagtttctctgtcacctaggctggagtacagtggcgtaattttggctcactgcaacctctgcctcccaggttcaactgattctcgtacctcagccttctgagtagctggaattacaggcacgcaccaccatgcccagctcatttttgtatttttggtagaggcggggttttaccatgttgtccaggctggtcttgaactcctgagctcaagcgattcgcctgcctcaacctcccaaagtgctgggattacacgtttgagctgctgtccccaaccccattgcccatttttataataaatagggttattttttattattgaattatgagttcttagttctggatgaaagttccttatcagttacatgatttgtaattattatttcccattctgttgaatgtcttttcacattcttttttctttttttcttcagagacagggtcttgctgtgttttccaggctggagtgcactggcatgattattgctcactgcaaccttgaacttgggctcaagtggtcctcccgcctcaacttcttgagtagctgggactagaggcatgcactactacacctggccaattttttttttttttttttttttgagacggagtctcgctctgtcacccaggctagagtgcagtggcgcgatctcggctcactgcaagctccatctcctgggttcacgccattcttctgcctcagcctcccaagtagctgggacttcaggcgcccgccaccacgcccagntaatttttttgtatttttagtagagatggggtttcaccgtgttagccaggatggtctcgatctcctgacctcgtgatccacccgcctcggcctcccaaagtgctgggattacaggcgtgagccaccgcgcctggcccaagtttatatttttatttaaaatttttatagagggtgtcactatgttgcccaggctggtcttgaactcctggcctcaagtgatcctcctgcctcagccttccaaagtgctgggattacaggtgtgagccactgtgcctggctccttttcacattcctagtagtgtcctttgatgcacaaatgtttctagtgttgatgatgtccagtttatcaagttttccttttgttatttgttctggttatatttagtagtgactgggagctcttcgtgcaaggtagaacttgtcacctggtgggtttcgctttagggtgattgggcttggggagctagctgtttgattggggaaatcaataaatatatgtgtttactggacttttttttccccctgaggtgatttagtttctccagagacgattcatctaatttccctggaagggacatacttggtcacaagtgttctggtagttggatttaggtcgggggtaggggccctgaccatttctgatgctggttctcacaaactctcctttcttactccccctcttccctctctttgaataagccccggtccctagaacgaggctttcacggccctnnnnnnnnnnnnnnnnnnnnnnnnnnnnnnnnnnnnnnnnnnnnnnnnnnnnnnnnnnnnnnnnnnnnnnnnnnnnnnnnnnnnnnnnnnnnnnnnnnnnnnnnnnnnnnnnnnnnnnnnnnnnnnnnnnnnnnnnnnnnnnnnnnnnnnnnnnnnnnnnnnnnnnnnnnnnnnnnnnnnnnnnnnnnnnnnnnnnnnnnnnnnnnnnnnnnnnnnnnnnnnnnnnnnnnnnnnnnnnnnnnnnnnnnnnnnnnnnnnnnnnnnnnnnnnnnnnnnnnnnnnnnnnnngacgattctctaatttccctggaagggacatacttggtcacaagtgttctggtagtgggataaagggtcgggggtaggggccctgaccatttctgatgctggctttcacttaactctcctgttcttactccccctcttccctctcttttgaataagccccgtgtccctgagacccgatgccctcctgtttaatttctgaagatggtcaccctttggtcttctttaaaaagtttttttgtttgtgtgtgtgttttttaatttttaatttcatagagacagggtcttgctatgttgcccagactggtgttaaactcctgggcttaagccatcctcctgcctcagcctcccaaagtaatgggattatgggcgggagccaccacacccggctgaccctttgatcttctaccgatgcatgggaggggtgggcctgggggctggactgtccagtgtacagactttttgtcagttcctggggacaaatcctgttccctccagctccgagccacgcagctcagcttcttatctgtcacccctgaagatattggtaggttgtgactctttttgctttctctacctcgtggaatccagtctggtcctaatcagctttgagtctccaaagcttgcccagctctcttgtcagctggtctctttgttttctttatctttgtggtgctgcatattgtttaaagttacttgctgttgtccttctagctgggtctctggaaggggaaaaaataaacttgggtagtcagtctcccacctttagccaggtgtccaggatgatggggtgacctgtgtgccactttgaaggggtcggcagtcgctgtttggagtgctgggctgagaaggctctagcagggaggagtgctgggtggacggtcacggccacgtgtgtagccagggaaatatttgtcagcccttctccttaagcgatgaggagtcacttaaggttttcgaacagggcaggacgtggccagggttgtgcttagttggttaactccggcacccagactggaagcaggtgtgagactcctgcagtgaagaccaggcaagacgcatgcgcctcctgaggacctcggccgagaggctggcctcagggtgtggcgtgggaggcaggatgctgtccactttttctcaggaggggcttaaatcatctcccagtctcccttccagccccggttgtgggaattggaacctgtacagctggcagtggcgcttcccaaccctgctgtgagtctgagggggcccccagccccctggagaagccttcacccttgcttgagcactcaccgcccccggcctgtccaggctcagccctgactcagcggaaggagcttaggcgagctgatctgtggctctttcccggcatggctcaggaccctggggatacagttggggtcagaggggagacccagttggcagtggcaggaagcaatcatgggaacactgccttggagcgggaggtggcatgtccgggaccctcttgcactagctcctgcctttagctattggtgatattctgtgttcttctagccaccctccagatgaggaccatcctaggtctcttgtttcacaagtaggggaaactgaggcatggagtaagcagggcctggccctgagtcccccagccggggtgacctctgtcctgtgggcactcctgttggatacttgctgtgagatagatgggcccagatagactgagagagatgacagctgcactcttctcaccacgttacatacagtcacacgtctcgtcctcaccacagccaagactgtggataacctcatctgcagaggggaaactgaggtacagacaggtaaaatcacctgccaaaggttgcccagttcatagtaccagacccataccagaccacggatccatacctgagcagcctgaccccagggtgtgtgcttggagccaccatactaaacagtcctccttgcgaagtcgctggctgccctccatgcagcgtcctggagcttctcctgctcccactggagaaggctctgaattgtctaaaacagatccccagccccctgaggaacagcaggcagtggtagcgtggggagagcagacttagctctgtgcagtcagtgtagagccagccccttaggcttcttgtgcgttctcgacctcagatatcccttccagaaaatagggcagtggccctgcatggagactaaggttgccagggaggaaggaggacctagaaggtacttttccaaacttggtagtggcctgtgtcctctctttctttctgactcttaggggagtttggaggtgggggttgatgggagaagagagggttgggacagctggtgccaaggacatgggatccggcaggttcccttgtggaccgtgtgctccggccgtgtgctgtacggacccagcgcggccctcggcttccaggagcccgcactctggataggaggatccagcacgagtctcagggtcctgggacaggagccgctggacagggggctgtggtgtgcccaccagcaaggcccttctgaatgtgtcatggcagggcacggtgggcagcagttggccccagctggggcagagtctcagttctaccacttgagaactgtgtcctgggcaaatattggcttctctgtgcctctgcttctttgtgtgaattgtcagcagtttgatcttggggacctgccaggggctgtgtcgctgaagaccccgtgtgtgtggccgcctggtactgagtggggggctgtggcctgcccttgccccaccccttgcctgagccctctgagtgccagcggcctgggcaggatgaggacgggtgaaatcagagatgagggagcgccggaggccagggcaccttggcggtcatctgctccctcctccgcatgtgtggggcgggcagaggcaccagaggaagacacatatgtgacggggaaaggtacatattcgtgtttgctgacaacgagactttgcgtcaatcgtgggtcctcacaggctgccccggctccccctgcatcgggaagctcctgtcttctgctccctggcctggtcccgccttccccctccatcagctggtgtgaacttggccacacacaattaggaaggaaaactgctcaggcaaggaaacggtgtcgcctctcccggagcctttcttttcctgcctggctgttttctcagtcctggctcccaggccctgaatgtgcgtgctggagaggcaatcagaacccccttggagtgggaggaggacttgtccgtccccagtccagcctccctgcctgccccctgagttactgctcttactgagggcgctgtggtggtcattcatagactctcggactgctgggacacatttccagctagaagtagcatctgccagcctgaagggctgaggctgctagggctgtgcacagcctcagccctatctgatgagcgccacggggcctggagcaagggactgatgtgatgaagcccccttcctcccccagagccccgcaagtccagcagaggccacctgtctctggggccggtgagagggggcctttggtcactggtggccattaacgccgctctgcacattggaaatgccaggcagagccgggctgcaccgtggaggcagcagagtaccccaggccttcctcccatctcagcctgctgttccctttcaggccctgacatttctcccaggcacataccagcacatgacaatgaatctgagcccctccaggcccccacacccgggctgcggctgtctctgctcatctgtcagtcacccgatcccccacacctgttccaggcacagctgcccacccgcacgcacagctatgaatagggcggagggagggttgcaagggggcactcacaggccaggggaccggggcagctctcaatttttcttaggccaagaagcgtagcttgtttggggtgggtgctcagtgtggggggatatgagggtggacaggaaatgtcaggagtatagctgcaggagaaggggtgaggctgtaattagaaggatccaggcactgaggaccagtcgaggtgctctggggcgggtcgtccgcgtcgccggctggtgtgttccgggtttatgcagtgtgaacatgagttctggggctgattgtgggatctctctttctccccctgacccattgctcaaccctagcacttgtattctatttgttctcccgattataaattccctgagagcagaaacaatgtctcaacctctctgggcccccctgcctctagcactgctggcctgggctggataaatgggcacctgagcgatgggaagagccagggagtgggagctgatgacagaagagtgtatttgagatgggggtggagctggggcgcaaaactctcagggtgagcaggacagggtaggttcctgcttgcgactgagggaccttgctcttctcactggtgccacccggaggtgagagggtgaacagccgcctgcaaccttgattgaaggcccaccctactaaggccctgggagagcttagttcttgcctccagggagcatcgtatctggaagggggcaaggacatctggacagattataacaagcagggtaacagagggggatctgccaattgctcctgggggctgggggcagctgctgcctctgtgtgtctggaagagcttggaggtgtggatgccagtccttcccagcttggcacataggatacttgtaaggtggcacatggatatgcattttttttaatagttaagtagttgcccaggctcaatggctcattcttgtaatccctccactttgggaagctgaggcaggaggatcacttgagcccaggagttcgagaccagcctgggcagcatggcgaagccctatccctgtgttttaaaataactttatttgaaaatatgaaaaatagttataggccagacgcggtggctcacgcctataatcccaacactttgggaggccgaggcaggtggatcgcttgaggccaggagtttgtgaccagcctggccgacatggtgaaaccccatctctactaaaaaaaaaaaaatacaaaaactagccgagcgtggtggtgggcacctgtaatctcagctactcaggaggctgaggcagaagaatcacttgaacccgggaggcgaaggttgcagtgagctgagattgcaccaccacactccagcccaggcgacagagcgagattccgtctcaaaaaataaaattaaaaaaatagttatatagttattttcatatatattagaaagaatagaatccttgatttcatggatttattgcttagaacggaattaaggaataaaagtgagttgatttaaaagaatcaggatgtgtcgtagatggcacatgaatgtggcattgatcagaggggccatgcacggttaaagtctgagggtcaccaccattgatgcctggcctcatctcttggtgttccccaccatgtccagtgcatccttcccaggcagctgggcttcctgccagcggcatttcaggcattgttcacatttctgccctgtgcttccagctacagcataagtcctgagcacacaaactgtcccccagcccctttttaggaacagtctgacaaagtcagtctcctaggaggagcaggtgacttcgagaaaataggagacaggccaggtgcagtggttcacacctgcaatcccaacactttgggaggccaaggtgagaggatcacttgaggtcaagagtttgagaccagcctaggcaacagcgagaccctgcctctacaaaaaatttaaagattagccaggtgtggtggcacatgcctataatcctagctactcaggaggctgaggggggaagactgcttgaatccaggagttcgaggctgcagtgagccgtgatcataccactgtactccagcctgagtgacagagcaagattctgtctttaacaaaaaaaaaaaaagaagaagaagaaaacaggagcccgaaagcctgggttctggtcccattcaccttatatttgcctgtaagaccttcggccagtcacagccacagttaaatctagtccggcagaggcctcagccacctctgccatgcccccctgggcaccctgcctacaatgtgtcatcccctcccccccggcatcacagatggagacagagtggggagactgaggccagctcaggggtggtagtggagggtgcttaggataaatgctgctgtctgtttcagaggctgagcattgacacgaatgctttttttccctaatggcctcatcaaagccgaggcaggtgcactgaaccatatgccattctgtttcagcatgaaaacagcctttttttcctcatcataaacgtaatccaccctcattctgctccgtagcctgctttcccactcagtgtgtttgtagtcatccatgataataaatgcaggtccttctcagcgttttttgtggctacataatgtttctattgtgctatagacaatcaacaccccccgccagtctagagaaaggtcgtgctctgggaaaacttctccaaaggagagaaaaataacgattgagtgtcccctcatggccagtagtagaattgcttggtgcctggctctgaatctggccaaaaccttctggggttctagggatccccttatctttgcacggaagagtccttggtgtcagaaccttgaccaaggcctgacgctttactgcattcgtagggctgcgctctgggcacagcttgcagtgatttcagaccggggtgtgggtgggaggagcggcctcccctgagaataagcctttgtaatgtgcctgtgcgttgtttctgagtcttgacttgttctcttagcacccctggctcagatggggtgatttgatgtggggctggagttctgggcatggggacccctaaggcgtagggcttcaggaatacaattcctgcctcagagtccccgaagcaccaaattgtctcatctggtgccttcctttcttcgctgtggcgctctgctggtttgggacaagtattggggttggaggctgaagacctggggtctttcacttaccagctggatggtgttgggcaaggctaacagtcaggacccctcatggataaagccgaggccgtggttttgggtgtgagatcggcacagagtcttactccgccttttctagaagggaagtttcagatcagccccacatccagcaggaggctccctgggctctgttttcatcaggggaaggaagagcagcctgtctgaggcaaggtgagaagctgacctagagcaccagtggctgggcctgtgaagggccttgtgagccaggccggggaccaagactcctgtcccttgtggctaaatggctcagtgagacggtgcagtgacttgtcttctgaagagactcccagggcagttaagagaatgaaccaaagggagggacagctggtgctggggagattgctctggaggctgaagcagagatgtcaaaagatccaagatgacgggacccagcagtgcctagagagggaagaggccagccccagagccgtttctgagggagcatcgatcaggtctctggcgagacaagaggatgagacaggagcagccttcaccccttccaccctccccactgccggtctcttgccctggttttctgttctcatgcttcctgcactatcaaaattgactctggaataattctgatagacgcattcaaactaaaatagagctgactggtagagattcaaacctttgcagtttaacaagaacaaagtcttagactatgaaacttgaagtcttaaagatggaatctggggctcccacctgctgggtgtgttaatatcggggcaggcagcagtggcctgaaactgtgtgggtcccagtgtcctcttttcccatgatttaggcaacacgacctgattttgtaccaggcagagatgtagaggaatgtggaagctttctggcgtcctactgtctaccctcagtctgatttcttcccagccctagagccgggaccgggaccctgaggtctccttgatgctcccgtctgacatggcacctgctgacactccctcgccttccccctgtctccctccaggcagacctcaacaccaacatcgaggatgaaggcagctccttctatggggtctccagccagtacgagagccccgagaacatgatcatcacctgctccacgaaggtctgttctttcggcaagcaggtggtggagaaagttgaggtaggaggccaccctggcgggtgagggccggtggcagtggtctgtgtttgctgggcgtggcttccatttgctttcaggaggaaagccctccgttagggagccaggacaatcccttgttgccttccctgtctgctgtcagtgctgtgtgcctcccacactccccttggcacgagtgtcctgcccaactcaccagagccattgctgccctttcaggatcttccaagcacgtccttgcaggcacccccggtcctctccaagggcagagccgcagcacaggcagggccctgggcatctacctagtccagccctctggcttcacagcggaggccccgagagagcggaggcctcccaccaatcgcctgcacgtggtcacacagctcactagtgcagaagcagggctaagatctctgtcccctgctcactttgaactccatgaatgcctaaaactgttccttccctgattttctacttatgggtaccctggagaccctgctgtaatggaagttacagaaaattcaggcctgccttttacggtttctcccactctgctaaacccccggccaagggcagtgcagggcagtggtgaggagcataagctcaggtgaatccccacccagccaccctgctttccggtgcgtgtctggggggttgtgataaaatcctctgtattttggccctaaacaagggccaagttatcttcactgtccgggacacggtctcctgcagcaccctgtgttctgggcccgctgcatagtggcagtgacaaggagctgggactgaaggcctccaacccaaagcacctgtggactctgagagtccgcggccctgtgccgcccacacgcttgttaaacctcctcaccgtgcaggccagtcttcgtccctctcctcaccccgtccccagattggtctgaattaatgaagtcctactctcacagtctgtcagttattgatagccttcctcatgccaaatgcagccagatgcccggccagcaccagggaggagacattcccccacacagtgcttctccgcctggctgcaccttacagtctcctgggagctttggaaacacaccagtgcctgaaacccattcatcacccctcagtctctagggtagagtccaggcattagtggtttttgaagagttcctcaaattacttatttctaattaaacttgtaaaacttttgagataatggtggatccacttgggctcataatcccatgtgcgctttacccagctcttgccctggccatatcttgcataactagagtgtaaagtggacaaccaggaaattgacgttgatgcagtccaccaagctggttcagatttcaccagttttataggcactcctatgtgcgcttgcatgcgtgtgtgtagacagggaaatttgcatgatcaccaccagactcccaggggtccctgtgtgcccctcatggtgtcctcatgtacagccaggattgagaggctcctaccactgctcctgtgtctccttaagctcccctcctgccatccccggttcctgctggtcacccatggagaaaggaggtcttgtttaatgtccaccaacctaagagggtgactttctttttttctttttgtgagacagtctcactctgttgcccaggctggaatgcagtggtacgatctcagctcactgcaacctccgcctcccgggttcaagcgattctcctgcctcagcctccagagtagctgggagtacaggcacgcgccaccgtgcctggctaatttttgtattttaatagtaacaaggtttcaccatgttggccaggctggtcttgaactcctgacctcaggtgatccgcctgtcttggcctcccaaagtgttgggattacaggtgtgagccactgcccctggctgggggtgactcttttcttaagggcccccaggctttctgcctttccttcccgtggagttgggtctgggctggaggtgggcagaatgggattctaagcccctgctgtccccgggtcctgcagacagagtatgctcgctatgagaatggacactactcttaccgcatccaccggtccccgctctgtgagtacatgatcaacttcatccacaagctcaagcacctccctgagaagtacatgatgaacagcgtgctggagaacttcaccatcctgcaggtgtgcggcgggtgctgcgggtgtggctggagtctgtgtgtgggtagcagccatggcgtgccccatctggggccctattaacccttgtctttttctctcccacaggtggtcaccaacagagacacacaggagaccttgctgtgcattgcctatgtctttgaggtgtcagccagtgagcacggggctcagcaccatatctacaggctggtgaaagaatgagagactcggggagcagggaggggggaagagacgtgtgtgcaggaaacggggacgtggggaggggacctgcaggggcagccccctgaagtgccaagagagctgagaggagcagttgtgactctacccaggaacaaactgtgcctgaacctgaggtgcccaaccccaaataaacccaagatgctgtgtattttcaga

SEQ ID NO: 73 - DNA, 83078 bp, Homo sapiens
  source 1..83078: mol_type = genomic DNA
gctgggagctcagagggagctgggagacacggctcacaacgtctccctcccacccggctgagaacagcctggaatccctgtgcagagtttgcctcacaccaggccttgagcagccgcagggacgccgctccccaccgcgggtgagtcccctcctggccctcctggtgacccctctgccgtgggaggctgggatgctgggggaatggaaggcttggggagtctccttgctcaccacaatctccagctgtggggagagggaggtgggggaggggaggggaaggcttccccagcgtggggccgaggcggaggctgtggagaggctttgaggcctttgcggacaggaaggaaggatgaggctctgtgaaggccaggccgcagacgccgggcttccttcccactttctttctgtgtccctccttcttccactgaggtggcattttagtttctctatttcccgattcagcttcccactccaacaactggaaatggagaggggtgcctggtgtctcaggaaaaacctaaataaatacatacacaccagaaatcaaatggatctgaccaggtatcccaggaccatctggcctctgcttcctccagaacacccaaatcccctggggtcccccgcagcccttggtgtcctcttaagaacgcccttggaaacttcaggcaaacctggcccatgtcagacccagcccactttgcttttggggtcagaaagtctgtgctgtttcccatcgcttggcttcattagttagtagctaggtctcagagctctcagagtcggatacttttctttgcctattcgcagatcaagggtcagccaggcttggtatagggtttaatttccgattattctggagccagacctgagatgggaaggaggcgtgggggtgggttttgcaggtggaccacagagctcgtagttttcttccccaggcccactgcgtgcgttgcagagcttggtggctaatgcttttggttgcacacgcttttgcatacaagtcgaaattacctctacttcctacaaagccaaagtctgggcaaatgagccttaaatctgatttgtagctgagaaaagggctgagtcaaaataataataataataataataataataataataataataataataaataggagtgacagctttgagaaggagtgcagctttgagaaggcacgggtcagtgtcataaccaaggctctgagagtttgaaacctaccaagtttcctgtgcctagtccacatgctcgcaggttgaaagcagacaacaccatttgttcactctgtagcctcaggaggacccagcaagcgctcttctggaattgggtaggattgagggcaaagcctctcagtcctggtgtacctattacaaatattagctttgtgaagcagagaacagaaaattgttccctttgactatctttccatctccagcagccccaccggcttccagggggtgatttgaaaagctgtcacaaaacttacaatcatctgcattgcttatctttcccctgcccaactctctggcttgcttacccttgctaatgttttcccagggctgatattcctgctcttctgtacgctgtccaaaaataagggaaattgaaagggttttagtgggaaaagcagggacgggccaatctgagttaagggaaagccgtattatgtaaggtggctagaatcctgtgatttatcatcacaaaattggattggctttttaagtagtagtagcagtagttgttgtagtatttgtagtactagcaaatgttttgtttctgctggtctcattttgataaatcggtctacagtaaaggatacttgaaagtcccactttatgaactattttttttcagagttcatttttagtgacataatcattgccacaaatttcctttttcttctaagaatttgtctctgaaagtgattttgcattctcaagttcgattaggggggagccttaaaaacaattttgtgtgcttagtattgaggaagtgtttataaattactctttctccctggtctagtctcaagtataataaaatatccatttcaaatagctttctaatgtcttgttatatttgccaagtgatttataggacagaaaattatagtttgcgtgtgtaaagttcagagatattttagagcttggagcagaggagaggagaggttttagggttaaattcaagccatcaatctccaattgtctaaacactacacgaagtggagattcgaggcaattatccgaataattgcgggggggggcactttcgcctgaattatctagataaaagagcgacacaggagaatgtcagtggccctgaaggccctgcctcggatctccacggtcgcgcgaattcgggcaatttttctgaaggttctcagactcggggatgggggaggaaggggacgtttctagaagaaacttaaagggggctcgcgccgcacgactgtaggtggagggcgtgcgccgcgggacgccccagccgggtctgataaagccccgaagccgatctaaggtcaataaaccaggcggcgtcaggcttgggccgagggccgggaggagaggagagtggagccctctcaggctggcggcggaatgaaaaggaaccccgactgctggggtccgagccctgggccgcttgcggggcgcgcagccggggagaggagctgggcgcgcggcctgggccccccacctgcccgaccccagggcagccaagcacccgcggccttaaaagtatcccggcgagccctgagtgggccgggtgctgggcgaacagtcctagccctgcactgaggttggaaaagcgaacggaaagtgacatttttacaggggcgaggttgggatcgggagggagatggagacccccgaataatggaaacgcagaagcctcagagacaccagcaacagatagagaagtgtccctaagaggggaaaatgaggaagagggtaacagtattgttaactggccatgaattttaatccctgttgtgtgtcgccgaatagtttacaaactctttttgcactggggttttgtttctcccactccccgcatgatgagaagaaagaaagattgggagaagttaatcagctcaaagtcacatcgccggggtctcctgccagggggcttggaccagttgctaaaggacttcccgccggagaaggtcttcccaagagagattcccacccagagcgcgcagcccgcggggaaaacataacgcgcgcctgtaaatgacgccgctcccacctaggccgctctggggccgcttaacgtccggaatgtcccgacccccggctcaatctttggtgcaaagcctgagtgggcaggcgggagaccaggcggtgccggtggagcaggctacttcagcagcgcgaggctcggaagatccccgcggacaggcgcgacaacgggccctggagccggggaatctctgcaagtaactaaccaggcccctcggattcattgccactttcccgccctcggcccacgaggctgaggagctccctctcatcgcctctccgttcctggcaaggccgaagccggtttgctttggatgcatttcgatcaatctggcgccacatgggccaggtcacctcggacgggtgtcgcgccgacgtccttcgtggtcgcacgctggtgggccaggaagcccaggctatgcccagccgggtccgagcggcggtcggtggcgtgacctcttgccacgcctggcgctgctgggaacgtgtctcgggtcgccctttgcgtcagagaccccccccttggggagaccggaatcctccagccgctgcgcacggataccctgggcggcgaggagagcccggcttctgcgcacccctctccagatgcgaggtgctcacccgcccctcgccctgctcaccccgacgcctcggtccccacgctctgggcagcaagacacatagcgaagcccctgacccatttcttctcagttgcgaccccctgtgtgagacccctaaagaggccaaggatcacagtaggtgtttcatcaaaatggtcactgtgtcccccaggttaggctgctggtatctcaatatccccctgcagagagaccccgcacccccgaatcccataccccaggctgcaaagcacagatctaatgccttccttctctggccggatttggagggacattgaggggcatgggtggcgccccaggctcgcagggttcgtggtccggaaaaccgagcccagggaatctccagctccgttctgttcgcagaaccttcgggggttagtcacaggccctggcccgcgcgggatctggaggcagagatttctcgacgtttggggacttacagctcgtctgggagcgactggattcccaggcctccgcacgctgaggttccggggaagagcactgtcttcaccacttctcgacctgcgccccaacccatcaaatttccagcactcgtccccctaggtctcataaaaactcctggcagacccttccgggatcacgcgtggctcaactcgggggccgtagctacgatccccgcgcagacgccggaatccggggcccggtccccgcgcggggtgcggcgctcgcggggggggggggggggatggggtcggtccctctcgggaacggctgctgttgtttctttagatactgaatataatttctccctcctccaccccactcgctgttcttaacaattttatttattggtttactattgtcttgtgaacgtttcttgtctcctccttgccttttttcatcccctttctctcttcatttctctctttttccttaattctgttgcaaagtttccttttcttgcttaatcaaaattctccccgcttactttgttctttgcccacagcattcgttcttcttttctccttgcctgcctgtcttctttcccgctgttcttggccgtgggcagacccggctgatgtaaggactgcagcttttccctggcatactctgcgccttcagatgtggtctgcgtctgcctgggtctcttcccacctcaatctgagatccttgcccctcacaataaattcgtttttattcattctgatgtttgtctacagaagttactcgataaagatgttttgtttcatgaatcaaaaggcttcttgtctgtgaattattttaatttctggatattaaactgcacagtagctattttatttgcctttaataaatttcttaggtttttacctctaactaatggcacattttaaataattttccaagcactaggtggtgtctgacaagattgattcactcaaaaacgatgcagaatttcttaaatgtagaatcttttaaaacggtgtcggatggcttctcctgctacatcgtttatttgtagcttccactaactctaaagattgaacaggaaactgatatggtagaaatagataactttgccttgttcactagctaagattttatttgctttctgttagatcacagtagtgctatcataataatgatagaacaattcgtcttttttgtagataaataatgatttcgagtgcttattatttgttttaggtagaatttgttgttagatcatacatgagaattttatttcatagaatagtgctgatagatagtagatgcttttcatttccaacaaaacagagacaagattttgcttgtaagaagtttttttcccttcaagaaacttaaagaaagctttaactcttaaaaaaaaattctaacaaaactttccttgaagaaacaaaatttttaacggggaaaaacttgaccatgagaaattcagaaggaagatgtgaaagtcagctatgtctcctctgcaatgattgcagaacaacaaaaatttggaaagttactatcctactggtcagacgtagtagtccccgtttgtgcaaaaacacctcttggccgtggcgatgtggggagggagtgtggtccaatagtccttctcacttctcagaggttgacacagaatctaacagttaccctcttagaactactccggagaattcggtaggtagtagctagtttccacaccggggacctgctttgttaaatgctatgggtgtggggacaagatactgggttcagagaaagttctgggaagagtcttgaggtggaaacagcctcggtgcgcgggggtttctcgacagctctctggtgtctcttaccccctaggttttcccagccttctcgccggattgccttggaaagctcttggtgtggtggccactggggtttgctccagcagagataatggaggggctcgctatctaatctggacagcagcaggaacaatccattagacctcagcatttatccggagcgggggaggacggagggacggggctggcgtgctccacctggccctgggaggcgcagagctgccccacaggtggcagggggattaatcagagagttttgtgctaaatcaaaactcaccactgcgtattatgcttgctgatgccggtaaatagtaattctacccattgtgactgttaggaagtagcagaatccttttgggttggaggtatcgttttttttcttttaagaagttcaatgagctttacattgtctcattcaaactcacccatcaaggggcgcggttcgattccaactttcaccgtattccttgagactaggtagactaaatccatccccccattctttcattcattcattcggcaaacatttaccaagctttcctctgcgctgggcgttatgccttgtactgacaggttaaattatttgcccaagatgaggactaaagccggagactggggcgggaccctaaatcaactatttcagtcccgcaactgctcacttgtttgccccaagacacacaaatcggagatgtttggcgttggaagggccccagaggttatctagccagccttccattcagtgcaggaatccctccccacaatgcctgggccaggcccctacctgtactctctgccagctcaggaaactacagctcccgggtgggcttcccatttgaaactggctctgtgaacgggaaagaatttccctgggagaaaatggtcttagcctgcccacacctaaacttggactgctgagcccttaatgctactgtgactcccaagtctccgggtttatgccccaaaagtaagagttcccctgcccagggcaacccatgtcctcagccataactggctggccacgacctgggctgtgccatggctcccttcagccttgccctggtgatggagatccctgagctgctagaaactaaagcccctgaaacctgaagacgctgtgggccttagtcaagccaaccttcctctgatgttatggtggatatttgctgccaggtgagagaaaacactacagggagtagccaaagaattgccagagcctagattctagattctagttcccacacaaacacctacaagctgggtgaccttgagtaagttatttcacttctatttctagcatagtctaaaaataaggtgcaggaatgtgcttctcaaaagttgaaaatgacatctttttcaaagataaaatttctccttatagtctgtgttcacaaaagccaatttctgaaccataaactcattacaaagaatgttctggaaaccttttagatttgtttagatcctaaatgtacatcgtccctaggtcagtgtaagagtttagactccagtattagaatgttgtgatttgaattccatctcctccactcactggctgtgttttcttggtcaaattacttaacgcttctgtgtttcagtttcttatattttaaaatctttataaaccttagaggacggaaagactgccctaatccctgacataatcatgtgttcagctggatgctaatgttctccttgtttttgtttggctttgtgtgttttgtttcttaacctattacttcaaaactcttcagaaattaaatacatctactgagaggtagaaatttatctgacacactgataaatatgttttttatttagcttagccaaaattgactgctgctggtggttgtggaaattgtgtgagttaacctttccgaaaggcaatttggcaatagatattcaaaacccaaaaagtggtcatattctttgacccactttttctggtaatagaaatttaccctcaggaaataatcagagattcacaagatgctttacttagcaaagtttataatttgacaaggacgcaccaaacattatgaattgaggtgaaaaacagaaaataacctaaactctaaacaataagagtttacttacatgaactatactaaatccattacacgatcattaaattatgttttcttaagatattcaatgacatgggaagtctcgattcttaagaaagaaaaagtagattgtgaaacacttctaccacagtcgagaaagagaagagagaagactaatgtttccaattctttctgcctaatgtggctaaggatggatttggttgtccccgttatacttttctgtatttccaaatggactatgacaaactcgtgtttatttgaaagcagaataaacaaatattttgagagaggtgaggaagattggccagatccaagacatgtcagccttcttcaggcttcctacgatgtttatgactggtgcgctttcgtagcaaatcatttgttccagagaattcagttttagggtccccaaaactcaatggactcaaaactccaagaacagccctggactcctgattccaggctagagatgttcacagttggtaggagtgatttttccacaaggaagagattcccctccccatttagaaaatgttttcaggtccaaattttctcagaatttcacttgcaaccttgagtgtttctgaaattgaaaacaatcatctaagttcttgtaacttttccctcttccacgactcccttttctggcaggaggatgtggtgggatgtgaggccaggtgtggggtagtgatgggggatgctgcaaatagaagctgattattcagacctcagggagggagaaaaggaggagacttggtggggaggaaagtcagagctttgttggtggccaagaagccaggtgttcagaaaggaaggccgtttgaaggcaagagagccaaagcggaggacaggactgcagactgaatgaatcacaagacagctcttaataaatgtcaggttccggttttgaaactgaaatagtttgcacttgtagagaaacaagtagcagatgccttcctcctgctttacaagaagggtgtgggatggagctgggggagagtggtcacaaaagcaagtagaagtgagatcccaccataaacttaggagaccttcaaaagatcttgtactgggtctgtttttttttttttaatcttaatgtagcacatcccagtcaacagaagataaaagtaacatcgagataaagaccaatttcacttttattaattagcaaataaatagcaaataaattgcattctgaatatagcatgaaatataaacttaaaataccatttaataatggtattttctttctctaagtcctacatttaaaaaaaatttttgaggttggccttcgttggttgggtgggtgtgtttgttgataatggagtgtgaatagaatttttgcaaatcacagaattttctgaagactggaggcagctcctcctaagctcatctcttcccttcttcatctacaaggcaagcaaggccgagacaggcaccatagccatcttcatgtaattttccagccccctacactgcacaggcatagtggtaggaactttcctgaaggatgattcttgcaggggtgagttccagacacccttgttgacttaattctctacaaacaaaatcctcaggctgggcgcagtagctcatgcctctaatcccagcactttgggaggccgaggcggtcagatcacgaggtcaggagttcgagaccagcctgaccaacatgatgaaaccccgtttctactaaaaatacaaaaattacctgggcatggtggggcgcgcctgtaatcccagctactcaggaggctgaggcaggaaaaccacttgaacccgggaggcggaggttgcagtgaagcgagattgcgccattgcactccggcctgggtgacagagtgagaatccgtttcaaaaaaaaaaaaaaaatcctcaaccacagttgtttaatctgccccttttctaggaaggggattaactccaaagcctgagcagacatctgtgttcttgatgtgcagaggatgccttccaaagcaagagatgtgagaagtgaggaggacacagctgggagggaagagatttcccttgcctttgaaaaacgcttcattctctgctagctaggcattctgggatgggtgggtcagtatgttgttgactgcttttcttatcgctgtaccatttagcatccccagaaatggctcctcaggcacagttttttttaggcatccatagaccaccctccccccgcagagaattatccagagaagtatccaaggtgctccatctttgtacagttttgtaataatctccacctgtaatcaaaatagaatccgggaggtcaagcaatcctcctcttggccctgcttcaaactgctgaaccaaacagagctctgtgccctcatctgtgagttgggggcaatgaataattgttgtggtttatcaaagtggtatcacatacatcacatttgaacctcacagcaactctctggtgtattattagaccatttccccctttttatagatgagaaaactgagattcagagatgttgtaaagccaaaggtcacagtactaataagtaacagaattgaactcaaaatgccttgctctaactaccaagtgctgcctccctcaccctccagagaaaagccaagaatacaggagattgtctacatgagctgatatgtaatggctctgacaggttttattgggatcccttactcatccaaaaatcaaaaaattacacagctacaaggctcctagaactgatcaagccctgcccccgtttcatttggcaggtgttgcccaatgaggttgagtgatttgccaaaggtcactccatgagttcatggaaaatgaccaatgtcatttttaaaaattagttaaaagtaccttctaccaagcccatttttatggcttattttaagcaggttaataagtataccaggcacagcttaaacccaactgagtaaatgctgacaccagtttatagattcagcagataagtagcaataaggaattattcatctctcatttatcatccagcctttccaaggtgcaagttataaagtgaagcaaatagcagttcaagagccccccacacacgtgagatcaaaacagtgaaaaacaaattgattttcaaagctatacatttataatgcgtctatgcctgaggtctcctgaaatatgaaaaagaataatacttgggaacattttttgcatttcagaaataggcacatttcttatacagagctctatatttgaccttcagacatattcaatcattaattcattcttttgagtatgtattgtgtacctactctgtgcagaccactgtaggggattatagaattactaaaggatattccagccatcaagaactttttaaacctactgaggtgacaaaataaagcacacatgcatgcatgcgcgtgcgcgcatgcacacacacacacacacacacacacacttgaatctcaaccctataaatctttgtgtggggacgttatgtgatgcccagagtcagtgggtgtcaggggagtgtgtgcatggggacaggagggaatggaaagattgcctggtgtgactaggggagccacaactaggaacacattgaggaggtggccttgcctcaaccttctccccagtgacatatctttctcatgagaatagtgttaggaaaattcataggcagaaaataagacaaagaattgatggccccaattaagaacctaatccccaaatcccctgaagcacaaactggtggagagatgggtgagggaacaatgggggcaatagcagttataatatttgtaatgtctgcagaaaatgaataaaatcaacagatgatttatttgggaggtgagcactaatgaattctcatgtgttattcagaaaggtcggtttaccttatatttttatcactcccagtcttccagtggtggacctgagacccaaagttcaatataaataacaaagcagcggcaaatccaataagcgactttgctcttagctgcccagacaagaagctgcaagacgacttctggaacctcccatgggtcaattcactgtccctccccagggatggggcctgtttcttcaggccagtaaccacttatttctgggccctgcatctgtgaaactgaagcattttccagtgtaaaaagaaatgggaagacattcactcaaaatcctttacttgggatattgggaaactgaggctcagcaaattcaaatgacttatacatagagtgaccacataatttatgcaaaattataagtgaatgtgtatatcactgatgattacccagaacagcagcatgcacctgacctgtttcaggcatccaggacattggatcacccccaataaacaatgagaatcagaacaaggacccacccattatgccccacacacacttggctaccttcttttgtttattttgaaggctgagtccacaagaccattaggaagatattcagcctagaggtgcaatatgtgcctggtgcccattttggcttggtttatccccactctaagtagtgcatggaatgactgcggttttgaatgtctatgacctccctttacctcatcctcaagccctcacccacccccacccttggctgggccagggtcactgtttccagtgccctgcaaggggtgtgggcagcagctctaaccaggctgccagacttctaggctctgcccgagagcccagggctgccttatctctgatcctctcaccctactgattacatcagggcgagggaagtttggccttaggagtcaatgtatagaggggaggtatcaattcctatagtagcatgttgaaatggataacagaatataaccagggtgccagggaaccttgtcctggctgtgctggtaaataggtgtgtggctctatagccctgtctggatactacttgcctcttctgcaaaatgagtggattggaccagaatccttgaagtcccttgcaataccagggctccacatcagtgtcagagagaggctgtctcaggactgataaacgggccaaaggtacctggtgccataatcacccaccaatggaggatgaaggtgtgaagaggtgccacgtggcatcttccgcacatgagcctctgtgtttgcacacagtggaagagaccatggcgcccgtgtctcagccacagccctgataccacatcttcagtcatcaaggatggggatttacactgtaataggacaaagtggaaactccactttttaaaattcaattcagcaaacttttttaaaaaatgtctactatatgttagaaactggaaaatacaaagatgtcaaatataagatttctgccttcaaggagactaaaattttggagagagaggtatatagagaggcagatgtatagacaggttaaactaaaatacagtgtgataaaggctgtagaaacagaaggggaaagagactgattctggaataaggatggaaattaaaaaaacaaaaaaaagctggcctggtgtggtggctctggctcagggctgtaatcccagcacttctggaggttaagcaagagggcagtgagagggtcactccagccaggaattccagaacagcctggtcaacatagtgagaccccgtctttacaaacaaacaaacaaaatagccagatctggtggtgcgcacctgtactcctcgctactccggaggccgaggtgggaggatcgcttgagcccaggaattggaggctctagtgaactatgattgcactactgcactccaacctgggtgaaagggaaacaccctgtctgtctctcttcaaacaaaaaaggttatgtaagaagataccctgcacaataccaatgccttgcccagaggagcagtttttgagttctgcagtcaacctacttgaatttaagtcttggctccaccaccttataagcggggcaagttacttaatagtttgtgccttggtttcttcatctataaaatggaggaaatagagtgactgtgtggataaatgattgtgtggataatcaatccacgcagcatacttggcgctgtgcctggcatatagcaatgtccagtgttactcagtaaatgtttgcctagtaaatggatcccagttttcatctgcaatccaagccttttattttgcatattcagatgggcctcccatttttagttcctcactgaacatattcattatgaatggctaagattgagttcagacttaggatcctggtgttcccaccctaagagataaggcctcactctgttgcccaggctggcgtgcagtggtgccatcactgctcactgcagcctcaacctcccaggttcaaatgatcttcccacctcagtcctcctggtaactgggactacaggcacgtgccaccacaacccgctatgtttttctattccttattaaagatgaggtttctccatgttgtccaggctggatttcgagagcttaaagtcacaaaatgttgggataggaaggaacctgggagacagtttagtagtctcttcattttatggacagaaaactaaggcttagaaagttaagtgactcgcctgtgggcatggcagtcctctggtggcagtcgtgggattagaatccgggaatcctgactcccagaccaaggagctccctccagcctcaactagatccagatcctcgaggcctaagcttcgctctacactgacactcaggccacagcaacctggggtccctccctcctctttctatggcgccccaaacaaaagactacctgtttcccagtacttaaggcacatctaaggaagaatttaggacctttcccagtccagggctagctctcaactcaaagagggaagaaaaaaaaaaaatcaaaaaccacttcagaccataaatgctccatgttgcttacaatgttgactttctcctttaattctcattcagggagactgcttcgcaggggatctgttcatgatcctcaccttagtgtcaccaacagaggtggccgtgggtgctttccgtagaaagggaaggtgacaggtgaggcaggcaggagctcgggccacctgttctccagcctaatggcctcaggtaacagcccagcagcctcactcctacttccccaaaggcaagagaagaaaaacgaggcaacaaccagagggaggaaggtggaactgggggaaactgagcgcaggggtggagaatgaactaagctccatcacaccttttcaagcacagcaatgacagtgtgtgctgttataaaagaacacttgctccatgagaacattagaaacgtacaaaaaatttcacgcaagacctcgccgtctttatacgcaggtgtatttacgttgatttctctacctatcttatctatcactatataattcgaatgaaccctaatagaatattgaccggtgtcctgaattttctcctcccgtgcacagcgtgagtaattcccgtgaaactatgctcatgcggatctagattgaatctgatccttcgggccgcggcggctccgcctgggagggcgtggcccccgcgctggggcgggaaccggcttctggggacccgcggcctctgcgcctcagccgacctccaccgcgggtgcgtgcgggggtgcgggggtgaggggtgcggggctgctccgtcgggaggctgggagggagagcaggcgccgggacccacgcgagggcgcggacggacggggggcgggaagcgaggctgccgaggggaggaagcggggccggcgcagcgggcgccaggccgggcagaggcgggggcggccggccgggggctgaccccgagcgccgccgagtttgcgccgcccgccgccccgcgctcgcctccagccgcctggggttccgcggcggccgtcagcgcgcacctcatcaataaggcctgccaggcgccggccccgcggccatccatcacccgggctgcacccccggccgcgcaccgaggcttctgccagcgcctgcggggcctctgcgtggagtgggccggcagcgtttttctacccggcaacaaatacatggctttattccacttcttaatcccagtgtctgttaacgatgtggtgttcatttgttcctaaagagctgtaaggaagcttagaaatgattcggcaagctgggcgcggtggcgcatatttgtaatcccagcacttagtgaggcagaggcggcaggatcgcttgagcccagcagatagagaccagcctgggcaccatggcgaaactccatctctacgaaaaaataaaattagccaggcgtcgtggcgcgcgcctgtggtcctgctggggaggctgaggtgggaagatgtgagcctggggaggtagaggctgcagtgagctgagatcgcaccactgcagtccagcctggtgacagagtgagaccctgtggagaaagagagaaagggagaaagaagagagagagagagagagaaaaaaagaggattgattcagcacaaacacacacacacacacacacacacacacacacacacacacagagagagagagagagagagagagagagagagacagaggattgattcagcacaaccggtgcatttcacagatgaggagaccgagggccagagtgggcggctggcgtgcctgaggccacaccaggaggaggtgatggaaactatactggggcctgcatctcttgccctacccccactcccagcccttgtgccctccaaatgggcactccgcaggtccaggatcgatatgagtgtttggcatcgaatgtgtgaaaagggccaagtcataggttatgggtgtgggtgtcagtgcatgaacagcacagagtccgcaggcattctgtcccccaactcaggccacagcctgtgtgtgcgtctgtgtgcatgtgtgtgcatgtgtgtgtgtgttgaggtccagaaagagtactaggtaaaagagaggggggaacacctctacattaaaagcaatgtgttccttgaattcatttaggtcgtctcccacctgcccttttccccaaggaggtgccgtgggtcccccttcctgctcgtgtctgccagcgctcactcctgctcctgtctgcaggacgcttttgttctccggtttgcgggtagaaacttgtgttcatccttgtatctacaagtttgcatgatgcctggcacatagtaaacattcaataaatgtttgctttgtgaattgtagctcttatgagggaattcgaataattctggatcagagggcttgtaggctgaaagaactcacagatcaggtgtccaatctcatttcataagagggagactgaggctcccagcattgccccattgaaccgttgcctgtttcactcaaggccttcctctgtaaggtcagagctggcgtggccctcagggatcctttcttttcttcccccagaacattgcgctgccaccagctctccgagccgtggactgcatcctcatcacttctttcccttgccaccttttggttcctctgctgcttaattagcaagctctcccagggtgagggacagagaagatcatggaagccaaactgtctgctttgttcctaagaggaaacacaatattttgtgggggattgttttgtttttgttcatggtgttgttttcttagtgttggtggtgttggattttaaattcaaattcaaatgacgaaattaaaatcagtgaccagtgggtgtctgccagtcttaacatccatttttcttccatgatcacagaggtatgactggagttagaaacaatcatattatcaagaactctgggaagaggtagaaacaatctctctcctctctctctctctgtctctctctcactcacacacacacctcacttttattgaagagcaagggtagcaaagacatcctgtggcccaggcagtcagtggctttgggctcttgtgtgatgtccactagactataattgctgtatatacaagtccagagtgtggttttatctggcacagagcactttcatcctgctaccttgcgccctgatggtagcccatccatgtgaacatcgtgacctgcaactgagcgtaatggaaattgacttaagaatgacagccagaggctgggggcgcggtggctcactcctttaatcccagcactttgggaggccgagaggggtggatcacctgaggctgggagttcgagaccagcctgaccaacatggagaaaccccgtctctattaaaaatacaaaaattagccgggcatggtggcacatgcctgtaatcccagcaacttgggaggctgaggcaggagaatggcttgaacccgggaggcagaggttgcggtgagccaagatcgcgcctttgcactccagcctgggcaccaagagtgaaactccatctcaaaaaaaaaataaataaaataaataagagccagagtaatgggttctgcagaacgatatcatcttgtacagaaaaggccatgtttcactgactgcttttcccttagtccattcagaaatacagtcctacgctcaaggggccaaagcgtttctctttcaaggccagtccttggcttacccttgcctcaggggaacacctggaccaaactcagtttccaaggactgactggttctctccgcttcccatcaccctctcccaggcagccatcaggttgttgaaagggacttagcaatccctgagcttctgctgtttggcttcaagaccttcaggatgtgagaggaggataaccctcactctgacgtcacccttcctgcagcctgcccaaaaacatgagtgcaccggcgctcgtatgtttgtgccatacatgctcaagataggcactggagctgtacccaggatggaccactgtggccattcctgtggactgaggatgagcaatagggaggaccaaccttgaaaaatgatcctttaaaaagaaatgcaaggctttcttttgtatagaaatcacttttctaacatattttagatgggagtcaaacgtgtaccagggatgtggactcgcactaaagacaggatggggctggagagaatgggagctgaagagtcttatcctgctccacctgtgctctttttccttctgcttttttcaaagccagatttattgaagtgcaacttatatacagtaaattcactccttttagtgtacagttttcagagtcttgacatacacacaaattgtgtgaccaccatcacaagatatgagaatagtcccagcgcccctccaaatttcttcctccccctctacagtcaactcttccccctcctcagcccctggcaacctctgatctgttttcagcccctattgttctgtcttcttcagaatgtcatagaaaatggattttgtctatcatcttttgaatattcttttacttagctgaatgcattcgagattcattagtgttgctggggtgtttgttgttcattcctgtttgttactgagtagtattccattgtatggatgtacctcagtttacctattcccctgcttaaggatcatttgagtggtttcccgtttggggcaattatgaataaagctgtaggttttgaaaataacaacaatactactttagagtttaaagtttaaaacacaacttatatttagctcttcttgtcctgaagctcattgcaaatagtatatctgctggggcatgttcaaagactggggtgaggacgtcacaatccctgacaaaaagtggtgtatggaggggtgtgtgcatctgcattggacgtgtggaaagaaagatatgaattcagagcttcagaggtgcagcaaagacagagtgctcacagggtgattgagaaactgaggtggcaagtaagtctttcatttactctacctgttctgagcccaccagcccctgagcctacccatctgctcagggagagtgtgggcccctggaactgggcatctgcagagacttcctgggggaggggtggactttgcccctcactggcggaggccccccggggagatggtgtgaaataggggagggaggaggcgatgaggtcgggatagctctgcaccttcctgagtgacatcctgccagtgccctccacctaggtgcggagggctccatttcactgcgcccctttgcaccttggattttctctcttcacttccttgccctttggcaacttgctgttcattagcacctctgctgcagaacagggggcagcaccagaagtcccactctaaccggagagcccctgtccttctgtcaaacacacgcacaggactaacgagggggatgagtggaaaccagccgcaaagaaatggagtgggaggttcttctttaaaatccattccgttcagaacacagtgaacaccctttgacagaacaaggactatctagctattccaagctccgtgcctcccctttcttgagactgttgttacaagaaaccgatgatttctaacaataggaacctcccagctggggaagcggtgttcggaggggagcagcgctctcggtgggcacctgctgcagttggggagggagaggtggtcgtggaggccactttcccctccaccgccagggaagcctggtctgtctgaaggggtcctcgcctgcgccgaggatggccggacggccgggcctccggccccagcacagcccccctttcagaggaccccgggtcttcgcgcctgcggaccagaggctgttttcgcacttgggcttcgcgcttccttgacactttcctgtctctgctcgccgcgccaggtcgcggcgcctgcctgggcgtcttctccaactccgggtcacctcggggcgagggcaagggtgccgggccggtggggcgttccggccaccacggggcggaggagggagcggcctttgcggaaacgggccgagctggctcagggaatgccagatctctgggggacccaccagtcccctgatgtgcgcgttgaggtcttgggcctggcggcgctccagccgcgggtgtccctaccataaccactgtcctccccgggagctgggcaagaggagccctggactctgggttgacctcgtcccggtcgggttctctctcctcccacccaggcccggccgctttctggcgtccgtcctctcccaggaggtcctggcctctctctgcgtcgccaagtctcttgactcccagctcgccttaacttcccagggtctgtggtctctctcctttctctgtctctgctctctctgcccgtccattgcctgctttggtttttccataatatttcatcattcaacactgtatttgacttacttattgtccgtttttctcttacagcatgtaagctgcttaggatagaattcttctctactttgttccatgctgagtactcatgcctgtagtattcctggcacagagaaggtgctcagtcaatgggaaatgaatgagtgggtgagtgagtgaatgcatgagtgaatgaatccccatctctccctctctgctgctggccagtcatttctctctgccctggtctctgcctgtcctcctctgtctctctcgcttttctctcccttctcttgtttctcctcctccactcctcaccctgcattttttcctctatccggctgacttggtctctccatccttccaggatttatgggttgggctccctatgcctcagaaagggtgcccctggcttctggtcagccttcatccccggaggcccggggactccctcgccagtctaacagcctaagcatctggccaggttcccagctcaacttcccaaatcctggctgtgcacagggaagtcccttcttcctgcagtccccaggacctggggaccccggggtgtccttaggagcagcctagatttgagctggtggtttgtaggcgatagcagctccacaggcagatgaagccaccagggagatttgtgccacccaggctgggcccctccctccacttctggccagtattctactctgagaaatggcagtcctgcccaccagtgcaccaggtcccttgaggggaatgtttcattctccatctccgagcaactttgatggatgttattaacagccctttttaaaattttaatcattcacccaacacttattgagcacctactgtaatccttgctttgggcagaccaggattttgatcactgcattcacagagcataccttttgggggtgtagaagggaggtgatcggtgcatgtgtgtggacagccaaccccatataaattactttataacttcagggggcatggacaagtgaataaagcacaagatcattttactagtccagggatgttaaccctggtcttgctctgggctcagcacaaacaacactgtgacttcaaaagtctctaactggggagtagcaaagccccatatgtgaaagaattggggcctgtgtcaccaagagagatctcagaggaggcaatccccgaagaaagggccccttacagactcaaagaacctccagtctgggaaccagactccctatgttctgggtggtgggtggcctgggcagtaggtgttagcagctctttcaggctgccattgtctccaggtccttggatggggagggagagagggagccaggttggcagcaggaaaagaaacatacatggcggcgcctgcgtggccactgcgcctccagcgctggcgctcctcaacctgctggggcccctgcctggacttgcaggcactggaccaggcttcagtcctagcctcagctacgctggacctgaagagcccctccctattcaaaaaggctatggtgtccgtcctgaactcagcaaaaatgttcagagattcctttccacttttttccctcttcctgtgggctctcagattatgagatataaacttttttaaacattgattttattttttaaatgttaaacatgctcattaaaggaaactcagaacaatttttaaaagacagtttttaaaaatacgttttcatggtagaaagtcgatattaaatagaatggaaaaaaaagaactaagattcaggaatccaggttctagacctgcagtttcgcccttgctttgccacctcagacaagtaccttaacctctctgagcctccatgtgctggtttctaaggtgagggcgataacaccgtctttcccttcctcttgctaatgatattgttgttccctagagaaaaatgagatttgaaagtgttctgtaatctggaagtgactataaaatatgagagggtgtgccagaaactctggtcctcagggctggaagcaccaggaagcatttgaggaggtctacgagggagaagatgtattcgctttgcaacccagagtagtaatttcgaaagcaagaccattaacaaggattgctccttcctctcctctcgtctgtaaccggctgcagagcacggttccgggcgaacagggcggaggctctacgtccactccgtatccccaagaaagagtgtccgaggcacggaccatagcaagtgaaggaaggtaggtcgacgtggccttgcagctgaattcgttctccatttttccttcagcagggacgcatcctgctctgcaccctggttctcggcgctgcgcccgcggaggctcgtgcagggcaggctgcccgtgcgggtgaggactgagtgccgcgcagggaaggagtatcgcagaccggcgcccaggcccagcgggggaatccaagggccgtgttgcaggactcggcattcgttctgcgcgggtcaccttgaatgtctgtccggatccctcgcggcagggccgcagaggcgcgtccatatcttggaggaattcgttccatagaatgaggtttgattctctctggggtttcttgttttccattataagactctggcgaccttggtggcgccagattttttcagatgttgcttttgttccgggtgtagcggccaagatcatggacccaggcgtggcacttggtttaaaacaaacttggacaggtcccaccaaaaactcgcagaaactcggcgctggaaaaccatcagtggcttcactgtgaattccagcatccaccgtttatttttatttttggggggaaccagtgtttagattgctctgtacacaatacgcagcgtacaatttgcctcttctggggtatggaccagctcaagtcccaagagccttaatggaacagggtaaagcaatttattcttgccttggagatattttttaaaagagtacagtacacctaagtaattcttgtttgtctaaaatctgacgacctgacactgggtcattagacccaggttcttagaaaaaaaaaaaaaaaaaaaagtcaaagacgttcacagtgttaaattctcctcctagactacgggaaaggaaacccgagagaggacttgaatggggattgggcctgtctacccaggccagcccaggcatatcttccttaaaaatagccaagaggccggacctcagagcacccacccgctgccccccttcccagcggcctctggagcgagagagaagcctgggaacctagagaggcgccgataaacctcctccagccggcggcccagcgaggccttgaaatgctccccgctcctggcaacgcacagccaacctgcaggctcccgcttggcccaagggagggagggggcgagcggagagcgaaggaggaaaggagggaaaaggaaacacccccaaaaaagcaggccgtttgccaaccacccctggtttgtccttgagctgaggccttggggagaaagttggggcgctggacctagaggaaaaagccacaagaaacataattttctctgtcccaggcgacttccagagacagcgaatattcctgggtcaggggatcccaggtttcagtccactaggagtgccagcggaaggtgtgggtaaaggaccggggtggtggggggtggtgggaggtggtaggggtggcccagggttggcagaaagcggcggctcaggtaatctggggttccttgcaagcaagcacccagcaaaagcaggcgttcccacccagcggtgtggcagcggccatccacagtacagcctgttatagccccaccatccacagcacagcctgttatagccccaccagtgtacagagcagggggttgaagtttagggaggatggggagggcgagggtgaaggatcgccgcaaggcaccgcacctcccgctgcagcccatcccgcactactaggagaagccggcgtaggagcgccgcctgtgtccttggctgtggggaggacgtcagatggcaccccgccagacactaagccccaagcccctggcttgttgctaagaaaattcactgcccggtccagactcagcccttttcgccctttaagggtcgcgcgtgggaggcagctctgagaccccgggtagcgctggagccacagatttcctccgagaaaagaaaggccgggatagcttcccgctcgcccaagcccagattttccactctccaggaaggccttgcaggtccctgccgcaggccttggcttcgcgcctctctcgctcgccccccacgaagatgattgccggtttcaaaccgggagcagggagtctgcttccttctccgctgagtccgaaggatcgcagattggagcgtgctccggagaccgcttttccgcagcgccggcctccgagatccccagcaccccttcagccttaagttcccacgtttcgggtccgtggcgccaattctgctaagtagcaggctaggaattgggggaagtcggagaagaaaccctaagtgtgtcgcccccagcttccgggatgcaggcccgccggggtctagaggggcggctgccgtgcgtccagcctgtgcgcaggcctttcgccgctcggcgccccaggcagcctcagtttcctttcctctgtttgcgccccagtgaacctccgcacctctcattcagggaagagaattccccgcgcagccgcgctcgtttcttcctctgggattttcctgagaatccccaggagttggccacgatcccatggggggtttccttctacccagccccgcgtcctggcctcgtccttaacccccgggttgccttcactcaggctgggaatccacgattgatttcctactacggaagcgggtggcgttcccagcctgctttcggagcagcacgggtttcgtgcagggtgttatcccgaccccttcccccatccctctaatctggcttgagaagcccgtgctggagagaaaaacgcggccttaaaaaaaaaaaaaagtttaaccgaaagcgtgagagccacccgccggctgttatctggggctgaaggctgcggtaatcgatgggttatttttacgcggtaatagggccctgtgattgctctattaacctttagacctgtctgagggactctccggctcgcagccccgctgcgctggggcctccaggctctgacgccgactcccaactcaggcctgacacattcccctcccccataccctggaagagccccctccatgaagaagctcccctggaccgcctggctccccagcccttgccacgtcccttggattggtgcagagccgccgcaggctgcagaaaaaagggggaaagattagaagagaggaggccacaggagatgggaagtgtcgccaggaagggatgcagattgcataaatacataaaattgaggctgaggcctgggctcccgaccatctccctgggattttgggaaggcaaaagggaggcttcggtctctacgctctgattttaggaggcagtctgggtgtctcctgaacctccaaggaatccggggctgggaggatccccactacccctgcccaggaactagcatccagccgggcaccccgggtgacccagtgccccacacaagatcgagagttgagcccaagaggtcaccttcttctctactggccccgcccctcgcccgccgctgcgggatgaggaccacaggaagggggggcggggagggagaaagggaactcattaataaagctgaccctgggcaccacagcgaacccaatcgacctccggctgggttgcgggtgattccccgctccctggcggtagcacttgggcattttccgcggagaccccagagcctggactttgcctgctgggggagctttccgcacagtcccgcagcctgcgcccagcggaggtgtagccggggccgcgcacccccgccccgcccttgcacgtgactcccacaggccagtcagcgccctagggccgagttgctgggccggggacccgagccgcgagctggggacttggaggcggccggcgcaggggccgcgagaggcttcgtcgccgctgcagctccgggggctcccaggggagcgtgcgcggaacctccaggcccagcaggtagggcttttttcttccctttctttgctccttcccgcggtcccccaaactcggagcttctccgcctttgcttgtctggaggtagagaggtagctagtgggaggaaaagagacgtgcgctactcacttcaccgaaattgcccaacccctgctctgcttttgactttgccttagcaacttctttaagtcaaagtaagacttgggggcaaaacagagaaatattggaagcgcctttggattctttccgtgtgaacttgaacgctttcaatccctgtccccgtgtgcacattctccaacccttgtttgcatatcgcaggccggggcctgggtggtgatggtggccgcgtgaagttaccgggactgacgggcccgggacaggctgcacggcagctcgcacatggagggaagtagacggaggcttgtcgcccaccagcgactccggggacgcagggtggcagtgccaggcagctccgctgggcctcaggggcccccgggagccgctctgaggtgcggagaggctgctgagtggcggaactattcatgccctttctggccggcctcctcgccctcggggctggggtccagggactgaatgctcctctggaagctcaccaccccacctgcccgcgctgcttctacctgaaactggccaagggcccgagcccggaccggagccgtgacttccctccgccggccacggggctgcccggatccgccgggttatgtcgcttggctttgggctcaggggtcaccgtgggcagaggggggtgccggggtcgcggactgccaccaggttgaggaaaggaggggccttttggctggggaaagagcgtggtgggggacccgcggccgatggaatccctggggcagcgcggcccgcaccgtggaggttggggaagcgcctcggggaagtgtttcctgtgttcccagaaaaggaagacaaccgagagcaggtttcaggcttttaaagaaagcctggggtgtggaggtgatgctccgcacacgtctgtgtctcctcccctgctgcggccggcttggttgtgccggctagcgtgcgaccgtcctcctcgctgcaggccgagagcggaggcgtaaacccaggccagcgaggagtgtcctataaagggacggggacttttcggcgcttgcaattctcccattctgaaaaatagatcggaagagggctattggttgattcttgaaaggggagcgcatttcctgttggcctgcgaatttggggtgaactgggacaagtgatcagaaggagagcaaaaactccccgattttggcagcctcgggagctgctgggctttctccgccaactgcaggatccaggctcaatttcaacaaccagccagaggcgttttccaagagcagctaattccttgtttttccagaaagttatagaggagtattttctccaccttctgttgttctagtaatccaactcaggcactatatcagccatttgaaaaggcagagaatgtgataaagacaaatattagattgatgacattttttgcatttaccttttaaagtctgcaagttactacctgtgtgtatactggaagttggattataaaattctaaatctcctttcttttccaaagttatgaaagaaaaaaaattacattatcttgaagaactgcaggagttgagtattccagaaaatgcaatgaaataggtcagctacttgattttaaaagtcaaatactggatcttttattaaggtaaacccataattctttaactttattttcaaagggaaaagttggtgacctcaggtcaatttttaaaaaaatctattctctaaccaaacttgctggaatgaactatttgccaaaccaataagttattgcatattttgaaagcaaataagcttttaggagttaccatgtgactatataatacaatacagtactattccattattattactagtgatgttgcaaaaaatggtgaaaagcattatgtagtgtgtattaaagattccatttccagatttttacagtaataaagatgatcatttattatagtatatacatttgaggtactttcttgtattatactagaaatctgtagtaatagtcaactgttatttagaactttctttttgcctgttaggacagttttataaaaatctgttataagtgttttacaaatattaatttataatcctcactcctaagcttcacgatgactctacaaaataagtacctttaatatctgcattttgcagatgaggaaactaaggcacagagaggctaagtaatttgtctaaaggtgtttattccgtaagtctcagagcctggattcatatatagttaacattcttgtaaatctactattgaaataaaaaagaaaactttgtcgggagtagttgcctcttcttaaagagagaaatggagtgtggtggacagcttcaagcccctggagccctactgatcccattcccttcccccaccccttctgattgtactttgatcttagacaagtttcaaaactttccagtgctccagttccctcttgtaaaatgaggagagacacctgtacttagtagagttgtagagaaaaggacctggaggtaattcagacagcaggtaattcaaaaagtggagctcttattttatcagaaaaattgcctgataataacaaaacgcaggatgctgggaagtatataatcaagttccacaaactgctctttccccaagcacccaccttggtgttatgattctgcttatgggtggatttattattctatatgaagaacccattcagtgaattagaatggtccagtgggttattctgtagagcggcattgtacattcttctcacttttctggttctgatatacaatttgcaaaacgtctaaattgtaactatttgcaagaaacctgtaacttgtccgatttgacgtccacatggttagtgtatggatgagggtttcagaaccctcttcaggaggcttagcagacaccgttgttcacttataaacatttggactctacttctggttttttttttttttaattacaaacaaaactttgttaggttgttgttttgtgtaaagtttgtccttgtccccccaaggacaatctaaagttctttctaggccagtctccccatctttcttggggagagatggggaacagaggagatgagagatttcttgggtcccaggcactctgcattaacgccaaacttttggacttacaaaaatatgcttgcagaataaggtaacattaaagtccttcctgacaagcaatacaaaaatcattgaccaagatcacaaccaataactgcacaccaaagacccgggaagcccctggtccctggggcgcctctccccaggcttgcctgggccgcctgacccaacgcctggacaaaacaaaggcccctgcttcccggcaccgcgcggcctccggagctgcacccccaaatccccgtggcgacttcatttgaagcgtggaagaagcaaccacgcaagtggagagtgggttctgaaagctctgggatgaaccaccctctctctttctgtcgttcctcttttaggaccccggctgcggcgaggaggaaggagccagcctagcagcttctgcgcctgtggccgcgggtgtcctggaggcctctcggtgtgacgagtgggggacccgaaggctcgtgcgccacctccaggcctggacgctgccctccgtcttctgcccccaataggtgcgccggaccttcaggccctggggtgaattcagctgctcctacatcagcttccggaaccaccaaaaattcaaattgggattttccggagtaaacaagagcctagagccctttgctcaatgctggatttaatacgtatatatttttaagcgagttggttttttcccctttgatttttgatcttcgcgacagttcctcccacgcatattatcgttgttgccgtcgttttctctccccgcgtggctccttgacctgcgagggagagagaggacaccgaagccgggagctcgcagggaccatgtatcagagcttggccatggccgccaaccacgggccgccccccggtgcctacgaggcgggcggccccggcgccttcatgcacggcgcgggcgccgcgtcctcgccagtctacgtgcccacaccgcgggtgccctcctccgtgctgggcctgtcctacctccagggcggaggcgcgggctctgcgtccggaggcgcctcgggcggcagctccggtggggccgcgtctggtgcggggcccgggacccagcagggcagcccgggatggagccaggcgggagccgacggagccgcttacaccccgccgccggtgtcgccgcgcttctccttcccggggaccaccgggtccctggcggccgccgccgccgctgccgcggcccgggaagctgcggcctacagcagtggcggcggagcggcgggtgcgggcctggcgggccgcgagcagtacgggcgcgccggcttcgcgggctcctactccagcccctacccggcttacatggccgacgtgggcgcgtcctgggccgcagccgccgccgcctccgccggccccttcgacagcccggtcctgcacagcctgcccggccgggccaacccggccgcccgacaccccaatctcggtgagtaggagcgcgagggctggggcgcgtgagggccggggcaggggccgtcttgagccctgtcgagggcctcttgtttttccaccaacgccttcgttgggctggggatggtgcttcactacctcgagtttctagggaaggcagaagccagtgcggggctggcgacatcacagccccagaagaccggcttctgtggaaggggccgggcctgcccgccggggcctcttctgagatggtgtcagggtcggagtgcggcctccccgccatcccagacatcgaccgtggccgcgctgcgctgtgggtgacgcgggaggacagcgggctccctggagagccgggggcagcggcctgggatttcctcgtggaaggtgctggagattgctgagtttctgcgcccctttcctccccgcccgccctcgggcctccgcagggaactgattacaatggtttggaccgcagaccttctgggccatttggcggcccagctggaggatccctcggggtagctgatgattttcccgtcgggggtctcacaccgagaacaaaggagggatggacaaaggagacgccggggagatgcgcggaacaggagccggcactgtgcgggtgccacccggccgagcgcgtgggcgcatcatgcgggcagcgggggggggggcgcacacgcccggtcagtgtccgggaacatagggacctcaaacgcgcttgttcatgacacccgagttaaatggagactttgcagtcgcttgcacgcgtggagcctcctcttctcgcgtgggccagggttggaaataaccgttgtggtaggttccatgcagtgtttccatcggatgtcagacggggagggacggcaaacctgtctcaacctccactgattcacaaataaacgcagcgggatctgagaaggggcctgagtacacgggccgggggagaaagggaagtggcaacccctagttcaaaatgcaaacgacctctggaatttcgggaagagacggaggagtgagtttggattgagcccaccctgtgggggaggggaagcccaggcttgagaagcaaagctcgcgtttattgaccacctactaagtgctaaatccttctgcatttgttctcactttgaagagtaaaggctacccctgccaggtttccagtcttgggctggctccgagaagggcctaggctttgaagcgcttttaaattgtcctctggccctgggtggccagggaaggttcccgggggtgcagccaaatacacatcgccggcaaactgattaaccctgaaagtggcgccgaggcccggtctgtggctcttggtgttcccctccccctcacccctcttgggggagccagacggccacccccaggggaggaggggcccggccgagcctcgccgcgacttttgcgagatagcgcggcgacatggccacacaatggagcccgcaggcgggagtgcggggcggggcgcggcgccctggccttgcgcgcttacggggtcctctccagggccctctggggcctctgacttaaaatagggaggactgggccaggagatcgagaccatcctggccaacctgttgaaaccccgcctctactaaaatacaaaaaaaaaaaaaaaaattagcggtcgtggtggcgcgcgcctgtagtctcagctactggggaagctgaggcaggagaatcgcttgaacccgggaggcagaagttgcagtgagccgagatcgcgccactgcactccagcctggtaacagaacaagactacgtctcaaaaaaaaaaaaaaaaaaaaaaaaaaggactggtccagggagagtttgctttgtaaccccgacaatcctggagggaatttggtgtttggttaaggaaaagagagaagttaaaagtcatgagttacatccagcagtgtaaaaacgaaatacccgccgggcgcggtgtctcacgcctgtaatcccagcactttgggaggccgaggcaggcggatcacaaggtcaggagttcctggccaacatggtgaaaccccatctctactaaaaatacaaaaattagctgggtttggtggtgtgtgcttatagtcccagttacttgggaggctgaggcaggagaatcggttgaacccgggaggcggaggttgagtgagattgctccactgcactccaggcctggcgacagagggagtatgtctcaaaacaaacaaacaaaaaaccgaaataccatgtgaatgcacacagtattcagattttgaaatgtcagccatgccatgtagaggttgctgatgaagtgatgtttcccaaattcccatgtcagcaaatggcaagctgacctccctgtgcgtctctctgccaagaactgccacctgccttctctgggctcttcccggatagcttatgaagtccacagcctttgaatctggcctagagggtggtttttctcttctgcacccagccaagtgttttaggagaggtgcggctctctgtgagggaacacagggcatgttgaacttgttggcattcatagcttcagcgtgttatgcaggtggcacttacataaaagcaactgaaattaaaagcagtgcatgtggccaggcgcagaggctcatgcctgtaatcccagcactttgggaggctgaggcaggaggatcatttgaggccaggagttcgaggtcagcctgggcaacatagtgagaccccatccctacaaatcattttaaaaaattagccaggcttggggtggcatgcctgtagtcccagctttggaagctgaggtaggaggctcacatgagcccgaggccactgcactccagcctgggtgacagagtgagaccctctctcaaaaaaaaaaaaaaaaaaaaaaaaaccagtgcatgtgaatgtgctttttatatgttcttcccattacttgggctctcctacctgcctggcagctttagtgaggaccagcatcacatagtagctgaccctgagtcatggagggaagatgagaactgaccccagctttctgaggagttgccactgagccctaagatggccagacagtgtggtgggaggagcacagggttttaaagttgggcaaacctagattcagttccaggagcctcgtgtcatcttgggcaagttacttacctctctcggtctcacctctttttctgtaaaatgggatcatcataacaatttttagtgttgccttaaattagaaaagtaaggtaatacttttgaagaatttggctttagcccttcataaatgatggttattttattgaatagccactcactgtcatgtagagttaccaattttgctggtgtgcccaggactgagggttttcccagaatgtgggattgttcgtggtaaacctgggacagtccccagtgaacgcagattgttggacactcaatgtgaaaatgggtgcattacccatcgttgtggtttggtaatgagctgagaacaaagaagaaacagcagaggagaagcagctgagagcaaaggagaagcagcatcattcttccctctgctgagattctggaagtagtcatttaagtgctgccagcttcatttggtcttgaagggtgagtaggagtttgtcaggaaaagaaccagcaattttttaaaaaaagaaatattgaccattttataggaaaaaaaagaaagacaaagaaaaagaggccaggtgcagtggctcacacctgtaatcccaccctttgggaggctgaggtgggaggattgcttgagctcgggagtttgagaccaacctggacaacatagtgagaccacatctctaaaaaaaaaaaaaaaaaaaaattaactgggcatggtaatgcatgcctataactccagcaactcaggaggctgaggtgggaggatcgcttgagtcagggaggttgaggctgcagtgagccgtgattgcaccactgtactcctacctggagaacagagcaaagaccctgtctcaaaaaaagaaaaagaaaaagaaaggatatactctgctttactaatatgttgtgtagtaccatgaaataatacaatgcaacctggcctttgatttaaataatatatttgtcacaataggtaaaactatacagactaattaaccttaactcagaaactgtttttaatttcaatgaggagaaacaagagaacacttttttttttctatgtaactgctgtagttttaacaatatcttgccatagttcttatgttggttatgtgaatagggcaaaaatcaaaacaataataaataataaaagttaacaggggcctctgtaaagccctgaacttaggttggaagaaataagtgtggcctgactgcaatgtatgtgaactttaattcactccaagttccatatgagctacgaccctaagacaaatgttaaaatcattaattaggctgcatgaatggaattatgtgaccttactgagggcaggtacagagtcttactcatttttaagtgcctggcacatgttgggcacttagcaaatatttgcgtagggatcttggtggtaattgccccaggactctgccctgcctgggtccaaccacacagaatggctgcgtgagtcctttaagaagcaaactggagagccctaggggaacggtgggcaggatggaagagggttctggaaacttcagggaaccactggaggaaagcagggcttttaggctggagaagtcactgagtggatgaaagcaagatggagtatgactgtgtccaaatttctgaaaagcaaaaaaaaaaaagaaaaaaaagaccatgaccttttaactctgtgttagtgaaggtgagcagatattagatgtgagaagaacactcctagacaattgtggttgtgtggaaatgcagtatagaatatggcttgtcttcatcataaactcctgggcgctggaagcacttgtggtggagctctgcggatagttcttgccttgcagggctaggataggatctgcatgtgcctgtgaaacggacgtagccggagaacgtagctgtttccttttaaagaacccagtcacggtggttacacgtgtatctccatatggcaaaattgtggagctgtgctcttaaaatgggagtcttttattgcatgtacattacacctcagtgaagctgatttttataccagttaatgcttgtgagtacttaaggctgaaaaggagaccgaaatggaaatagattgtaaatatgccttgacggatatatggtggtaggtgttactggaaaggctaggaaaatatatttaagtatggaataacaattattttgtgtaatggagacataagcaattatgatattctccaaggatttcaaaaagtttgaatcatttttagagtcgataaaaataacaacacaatgaaatacatgtacagtatatcactgtgttattcaaacaatttatttaaaagaagttttgccccattagggatggagtgggggcattcaaggtgttctcagagtttttttatggtgcaggtcagtgaaaaaccccgaagtgttttctggatcttttgggacctgcttatcaagtacgctagtggctttcaaagccggttcatttgtgcagggaactttgtgagactggagaatgatttgtcgatcttcaggaaaaccaaagttgtttaactttccggttaccaccctgagcaggtcagtcagagttggggttggtctgtggtgctaagctgagaacgaattaaataagaaaggtgtgttggggtggccaggggtgtgtcactacctctagtgagccctgtcacttgcccagttgtgtcccatcaaaaggtcaggccacatttgctaggcactttctaagcactcaggtggaatgatgcccgggagacagttctagataacgctttattctgtatccctccccatttcttttctaacttaaatgcactaagaaaacaaacacactgaggtgtggggaaacaggaactctgatacctgtgggtgggagtgtaaatcgctctgacctttatggagagtcttaggtgtagtagccataaaattgcaaagtagacagcctggactccggaattttcacttctagggatttgttccacaagcacaccggcacatattaatttcagcattgctcgtaataacaaaattggaaataatctaaatgtgcatccttaggggaatgtttttatgcacgtggcacatacaaaccataagctatgtaggcaagaaataatgaagttcattatctaatgtatggaatcctcacaaagacatttataaatgcaggaagtgtatatagcactttactgtttgtgttaaaaaaaagaaagaaaaagattatattcacttgaaaatacaaaatctcacaaaaaatttgtaacacagatttgcctgtggggaggaaagcgggtaggtgagggataatggtagaaaagggactttcactatgcatgccttggaactttttgaattttttaaccaccttaatcatttttatactcatttctgtgccttattaatccatttaataacaagaaaatacatttaacatacagggaagttaaagttaagtttaatgtaaaaatttcaaatcatcggctgggtgcagtggctcacacctgtaatcctagcactttgggaggctgaggcgggcggatcgtgagatcaggagaccagcctggccaatgtggtgaaaccctgtctctactaaaaatacaaaaattagctgggcatggtggcacgtgcctgtaatcccagctattcaggaggctgaggcaggagaattgcttgaacccgggagttggaggttgcagtgagccgagatcacaccactgcattccagcctgggcgacagagcaagactccatctcagaaaaaaaaaacaactcaaatcatcttagccacttttaagtatacagttcagtagtgttaaatacctttgcattgctgtgtatcagatctttagaacttaaactctgcccattaaaataccactcccattcctctccacaccagcccctggtaacccccattctattttctttttcttatgaatttgaccactctagggacctcacacaagtagaatcgtacagtgtttgtcgttttgtttctggctaatttcatttaacataatgtcttcatgattcatccatgttgtagcatgtgccagaatttccttcctttttaaagctgaataatgttccattgtatgtgtagaccacgttttgtttatccattcatccatggatggacacctgagttgcttctccgtcttggctactgtgaataatgctgctatgaacatgggtatgcaaatgaaaccttttgaatttggagaatgtgactatattacctaattttaaaaacatattaaactaattaagttttaaaaaacagatacatgatattcatgaatcaacctgaaagtagcatctttttcttttttttttaaagaagattctctatttagtgtttatggatgcacaggaaaactgctttaaggcataagttgttttttattaaatttgtcttttacctattcttttacaattttgggggttttcctttatgctcaagcttcctcaagattcttcaaggcagatcaaaaccatcctcagtggcaatcctgtatttggcttttgattttgcttatttcacaggaggttgctttactgagagggggaaatctctactcctggtctcagtgctggtagtggatctaaatcagcaatgggcggacaccccagccccacactactgtggcttccccacttgtgggcacaaacagtcacgtactaggcaatggtgacctctccaggtaggcagttttccctcaggttatattggagttagaacctgcctgaaaaccactaaccggctgcagcggtgggattgtgtgaagaacaagttaccttcctccagggcaaggtgattcttttaaacaaattttaagacaatttagttgtactgaatttagagctgaagccagttgcaaatgtagctgcttgtgtctgcataagaaagaggaagtatgctagttttcctttccttgttccagaagagggcagttcttgccaacgcgagctgctgctttaagaacttgaagcaacttttctgacatctgaaactatttgtcttttgggaacttatttgtcctagcctgcctgcagaaccagctgttaaggctctgttgggaaggagtatcgctctgctatattgacctctggtagaccatgacatggccccatatgccatacaacataaactggttactaagagtaatttaatggctatctctagagctactcttttgttaccttctaaagaaggcagggaagaaaatataaatggggttataataggaataatcttgaatctgttttaatttatacaaaatacatttataagttttggcacattcacgtttggatactggctaacaactttttagcgagagtagcctgtatcttgcatgtcattccattgaacagtaaggtggatccctgtcaatgaagaaatcatctgatgccagggactttgaagtctttctccaagaggtagatacgatgatctctgttttgctggaaagaaagctgatacccagaaagagcctgtaatctcaggtccccgtgggtagtaaacagccctggtttggaacccaggtaagtccaacctgcaggattgtactttccccctttccccacactttgtatttgccaaatctgatatgagggcacttggctcttcagaaccagaagctatgtgtgattgaagggctctattaaaccttaggattttccatgacttgtcgctcccatccgcttcctctccccagggtagcttcttgtctgagtttccgtttgcttcccaccaatcactgtctctctaggagcaatgtcgtcctacggaatcttccgtatcattcctcaactgtaagctctgcagttcaggaatgcaatgttaggaatcccagtgttgcacaaacttcctttctagccgttggattctggtgtgcagagaactaaagagacttcccaggattcagacccttccaatgggaggattctcctaactctaggggaactgttggctgcttaagagcaaaaccatatggctcactcaaaaatccctttcctaagagaaatctataactgaccctctgtgttcccttttctctgaagatttcaaatatatttgtggtaaaagcagagaaagaagaggagaaaatcataataaaagcacaataatgatgattttagtaaagataagaatggggcatggatcaagacaatgactaaaaccccaggcaggaaaagccccgtggaattggtctgaactgaatgtagcagcccatcagtggaagttttcttgtttctggcaggtggcctatgcttttatctattactgctctgtaatcagaattgagccacgatattcaagtttcttatctgaatgatgggaatttggttttctggccttctgcattttgcaggagcccaagaattgacctgatgttttaaaatatattttccctccaaaggaggagtaaaatccagacaggtgggccattctgtgtgtttaaagtcattgaaaagcctctgcaagtaaaatttgaggctgtctgtaacccacattgaatagttacagatatattttattttggaggataaaaaatcaagaagttactaccacaatttggtgggaattttgaattttggagttttcctttgtactcaagcttcctcacgattcttccaggcagatcaaagccatgggttttgggatcccctaatcgcaaatccagttttgcttcttaaaatctaatcagtccttaagttattttttaaatcttcctttctactccccagttgaaatctccatttctacttctagaaatccagtcaaaccttatcgcctccatttagaactgatcgatagcaactggtgagcaggttaattataatcgcagaataaacgctgaagtctcaaagttcaccacttttgcaatgtttccaaacccctcgggaccatgccaggaggcgctcattgacccattccgagcaggtgtgggagtttgaaccaggggcagacaatcagatctgattcaaacaactcaatttggttgcttatctagaggttttcctatcttatgatatctgtcattttagataaaaaagagttcatcaattgagctgggaaatggcaaagttacattttattctgataaaagtttgctagttgttgttttatcagcttgggttgaaattgtgtctccgtcaaggtctgcaatgaccttttcagatattttatcaggtattaggtgggggagtcctttttttttttttccttctttgacctagaaaagaatgacctgacttccaagatcataaatcaaaccaggtaaagacaggcaataatacaggttgcccctcaaaattgagtaggcggggaaaacaaacaacaaataaaacctttccctagcatttggggagaacttaacttgacccgaaataaagaatgtagttcccacggagtgcacagatgtaggaaaatactgcttattttaaaaaagaaaatgctttccaggcaaaaatggcttcagagaaacacgtagtaattttttttcaagtagtataagggaaacttctttattttatgaaactcaatgtatatttattatagaaaaatggaaaactcacataaaccaatgtaaaaataattggtaatcttaccatccaaagataaccactgttaggcattaatccttgacttccagttatcctacatacacaggtatgtgtataactacattattaagtagtcgtgcaagttactgtttaaagtcatttcagcactgatggcaatttctgtaaaattagtgacccagattggatccttaaacactgatgccatttttaaataaagcagaaatgagaaattgaccagcactgtcaataacagctgaatggaagagttgggtgtaaaaacatattttttaatcttatggtatataatttatagccactttaaaactaaagcatatttgtaagttttaaattagggtccttgaagcgaggtgcccccaggacgtgtgatttactaggcctcactggggaatgggagttgcagcgctgaaatctgctatttgaaaaggggtgacccaagatcccagcagccgcagggaggtgaaagcacattggtctggcgcggagaaaccctgggctcctctcccagacccttctcttcctgcggtgtgactcactgcctctctctgcttgtgtggccatttgtaaggtgaagaattcaggtcaggtacagcaatggtgagaaggactgctctaccgccctttggagatgtttaaaatcgagtgtcttccggcatgccccgtgatagtcattcaggctgactttgtctttcccggtaccacagaggccacattaacattaagccttcctgtgcctgcgtggacatcaaactcgaattcatgcttgcctgtgtcaggtaggtttccacggctgcctgccttgttttaagcaactctgtgaaatcttgggtttgatggactcatcttttctttttaccttttattttagatttgggggtgcatgtgaaggtttgttacataggtaaactcgtgtcacggggatttgttttacagattatttcatcacccaggtattaagccccagtacccaatgcttatcttttctactcgtctccctcctcccaccctccactctcaattagataccagcatctgctgtttccttctttgtgttcataagttctcatcattcagctcccacttatatgtgagaacatgcggttagtttcctttcctgcattattttgctaaggataatagcctacagctccatgtatgttccctcaagagacctgatctggttttttttttatacggctgcattgtttttcttatgcaaagtgacctcaggtgctctgagtttcctgctgcttgggctttgcttttcagttaataaacccactgagtgttgtctgcaggtctaggcagtggtggagatttcatagaagttcagctcccttcacaccccagctccacatgcgtgatttgtttcatccatccaccagccaataaatacttctccccattccctgtgagcctggcgctggtcaggctgtaaagatacaaaatgaacagaagtgtctccgaatcccagcaacttagagcttgctaggggagggaacacgtggatgtgcactcttaggggcaggggatctgaagcgcaagggggcgaaagtgggttctacggagcccttaggataccgaaactggcctgggcgcctgaagtcaaggccaggcttcctgggcaaggcagacttgtggcatcctaaaggatgagtaggcgtttgctgcctataggaaggccattctgagcccaggacttagcttgaatcaggctgttctgcagtcccgagtggagggcgcgaggcaggaatgcaagcagaagcacggcgttgagggatgttagaatgctggaaaggtgagcaggattcgagcagcacttcagatatagcgctttggttatggtataagaaggcgcaagctcctggctgttggttttgttttgcacccaagcagggtgatgagcgcctcccgctgagtcacccatttcccatcggagaaggaactctggttaaaatgaagccgcacgctacaggccagttttggaggatttatgtggtgtgcttcggcagcagggcacggcggctgtgtggtttgagttcaaattgagggccaagaggggacaaaactcaagccaattttagtccccaaatctggagccctgccctgggaaggaagaggagtgttcgtctgacccagaaggtcaagcatcttgtaattctgccctcttcttgtactttctctaaaggtggtgggatgacataggattacaatatagataattacaggggacaatactatgatgcaaggatggattgccagaccctgtagggtggattcacctacctcccaggaggtgtagaggtgaagaggaagggctcagatcaaccgatctttctttctcatttgaacctctctcactttgatccatcacccttcctttaattttaagttcaatttctaccttttaaataggttaaaaaacatttttttgagacagactctcactttgttgcccacactggtctctaactcctgggcttaagcgatcctcctgcctcagcctcccaaagtgccaggattactggtgtgaaccaccacaccccacctaaataagttttttaatgtgaaaaatttcaaacataataaaaatagagagtagaatattcatccctcagctttgacaaatatcatttcatgaccagctgtttaatctatacattactcactttcccccacacagtgttattttgaagcatattccaaacagcatgtcattttacccacaaatacttttgtatatatgtctgaaaagtacgaggactcttttattttaaaaaatacagccccactgccatgttatcaccctgaaacaaattgtcactctttaatatcattcaatatccagtcactgttcaatttcccagtttgtctaattgtctttaatgccttgttccaatcaggatctaaatgaggtctaagcattgcctgtgttatgcctgttaagtttcttttaatctatgggtttctctttcatctccttttcttctccttgcattctgtttgctaaagaaatgaggcttttcccagaggacttctgcagactggattttgttgactgccttctcttcatgacattgaacatattcctctgtcccctgttgctcatgtaagtctgtgatgggaaaaataggcacactcagattcaagtttgtgatggcagcagccctggatgctcattgcctagaccctttactttgttaggcattgctaatggtaatattctactgccaccattccttcttcatttgttagctggaattcttctatagcaacaagcacatttttagcttattgaatatttggttacttggaggtacagtttgtctaggaaaggcaggatacatgcctgctacagtcgctttacttttcattgttcaaaagaacaaattagttctctagcatccttcaacaattaccaatgaaatgaaattgttttcagcatgattaagaactcatggacttcagctgagtatagaggctcatgcttgtaatcccagcactttgggaggctgaggctggaggatcatttgaacctaggagtttgaagccagcatgagcaacatagtgagagcctgtctctacaaaataaataaataaataaataaattaggcaggggtggtggcatgtgcctgtagtcccagatacttgggaggctgaagtgggaggattgcttgacctgggagttcgaggctgcagtgactcatggtccaaccactgcaatcagcaagaccctgtgttaaaaaaaaaaaacaaaaaaacctcatgggtttaaacaagcatgatgtgtttctatccatatatcctgattgatgttcagattgtcctatctttgctagagggaacttgcttaaactgagctcttttgacaaaatcttagtttaatagtttcttgctttccatcctataaaatgtcctaatctctttttatgagttttctcttgccaggcctggatttggccatttgccccaagaaacctggctcctgttagtgaggaatggcgtttggagatcaatctcagagctagctctgccagctgggcttattgctattgggttagtcattcaacatgcagagtcaggaaatacgtacccctcctaccccaaagataagataaaatacagcatgtcttcatactgatgctttcaattcaaatttagggctaaaaggcttttacttgcttcattcatctttttaaaaaaattatcttaaactatacataagataaaatgtaccgttttagccattattaagtgtacagttgggtggcattaagtacatccacagtattgtacaaccatcacccccagcagtctccggaactcttgcatcttcccaagtgaaactctgtacccattaaataacgtctccgtatccccttccctccagcctcaggcagcccccattgtgctttctgtctctctgaatgtaactactttagttacatggaaggacacagtattctcttgtgacgggctcgtttcctttggcatagtgtcttcaaggtttctccattttgtagcatgtcagaatgcagcatgtcttttttttttaaggctgaataatattccattgtatggatcgatactgtattttgtttatccattcatccctccatagacaattgggttgcgtctgcccattgaccattgtgaataatgccgccatttttacatgggtgaacaaatatctattcacctccctgcttttacttctttatggtatatgcccaaaagcggcattgctggatcctagggtaatgctatgtggtttttagggaccatcatcccattttccagagactgcaccattttatatccttcatggcatctttacatctgtcagtctttccaaaaatcccattctcaacatctccaacgtaattcttcattttctgtatgtcataacatcctcatctctgagtaacaataggaacacttcaccagcagtacgagtcctgaaacccgccctgtgttgcttgccttgtcttgccttttgacattgggctcacctccagtgtttctagctgttggctgtgggctcctcatcaccttcgtgagctggtggcacatgggcaggcatgaataaataagtgccttagggacacatgcacaaagaagtgtgtgtgtgtgtatcaaatgcattgcccacatggaggctgaaggcagagtcttgagagaggaggcgatcagaggcctaacccagccttgggagtgagtgggtgatgacagaggacatggagggaaggaaagtcacaggccaaatagggaaggaaggccatgggggagccagtggccatcgtctttctcttgagctcctgtagccacagtgtgaagggaagagctgtatgtgtaagacgccttccatgtgcccctcatgcccgcagtgtacacgggctgggggtgggtcatcctgacgttgcccgctcaggggtggccttcacgtttgcttcaccgcctttcattctctgctgtccttctgtgttgtcatggaaggagtcacgctctgtccttggagcctcgtgcgcagcccatgcagtccctgtggggctggggtagagatgagggaggagggataccctgtagcaaatgggatccggtcatgtggcccaggccaatgtcatcatcctccccagcagggacttagatccatgttttcccaatagctttatttgctgggtggagaaagtctggaggaacttttgaatagggagttgagtacattttgagtaggttgtgaaagttaggaaagactgtctcacccccagtcctgttgaagccccgtgcatcacgcaagggctggggaatctgattccgtactggcccccaccttcagaagcctccggctccgggcacacgctgggaagtggatgccactgccagggagggaacttgcagaaccgaaggcctctttttgcctggtttcctgttgggagaagagcaagttctacagtatttctggagagtgcttgggttttactgcgcaggctggggtgagtcttggtcttagtggggatggccaaggttcgtgaaactcctgcccctcgctcttcactctggaggtcagacttgctgctgcctgcctgtcgtggcagggaagagcgtggacccagcagccttggctcacagcgagtgctgaccctaagccattattactcggcaccttggcaatccatctggtactgatggcctcaaagagggaagcagaaggtgcatcttgcaagtgcatgaaagccagtggcgggaaaggggcctgggcccggggggtggggtggcttctggcctctgcatctctgtgtggcttgtctctgcatgcagcttttgactcatctccagccacaattcctgagcgtcagcctgtggcctctgttctcattctaccttctggtgctgtccttttatttggattatagttccactagcctggaagtattttcagggcaagaattatgccacatttccttctggggtccggaataccatcacctggtacatacaggacacatgcacgtattccttcacagaaaagatgcagcccggaatccatcctgaagcatttggcagctttggctcacatattcagacctctgtgaaaggctctgctgagacatcttcggcgggagcggagccatccttgtaaaaggaacctgagaaacagaagcccagggatgagcccatgtggatccctggccagttttacagggagaaggaccctgagagacgccagggagactgaggtagcaaaggcgcccaaaacctagaaggccaggaagcgagagaagagcgcagaaagttctaacattatgttctcaaaggtagtaacacgggaacagggcagtgaggtgtggccaacaccggggacctcttgggtctgaggcagggagaaaggtgcaggtggagatgtcccagggacagggggacaggtggcagtggctggactctgagggctaagggctggtgcacatgtgggatactccagtctctgtttgaacccttgagagcaggagagagcccccaggggagtgggggcggtgcagaggggtggaggaggagctctgcagagctgccttctgatgcagttggaggccttgggaggcccagagccaggcaagggagatgaggaagtggataggcgtgtgcccccgtgtttgcctgtagacaccccttgcatcctcacttgatcccttgatgctctgctgggccctgatggtgccctcctggcttccaaaggccccctgccatctttacattccatcagtgttctggacctggagcagatgactcacaatctttccctgccagcttgcagagacttccggagttttcactcatctagtttgtcctttcccatcttgggtgcctcagcccactgtttttccctccaactcactttgtgtagattctccatgatccttcctggagagccccttgaggcaccaggagagctgtgcgtgccagccatgcctctcagcctcatcataacaaacgtcacagggaaacaagctcccttcagaccctgtttaaaggcgtttaaaggcggtaagtgcctgtcagtcttggaggatagtgactcactgcctgaaaaccttcacagaagtgacaagacacttttcttcggggaatgttgatattgagtttcctcccctgtgtaaacacatctccaggagtggcattaataatggggaccctttccccaggacaaagcagaggatggggggagaaggaagaggagaatggacccgcctgctgggaaggggggagagctggccatataagcagctgttcctggtgaagggggagcccattagccagacccttttttcatttgttttcagggattttgcttataatctttatggggaccgccaactttttatttgacagttgataaggagaggcactagagtctagtaagtggttaaagaagctggagtcaggcacctgatttaaaattcctgctagcctgggtgcggtggctcacacctgtaatcccagcgctttgggaggctgaggcaggcagatcgcttgagctcaggagttcgagaccagactgggcaacatgatgaaaccctgtctctactaaaaatacaaaaaattcgcccagtatggtagtgtctgtctgtggccccagctagggaggctgcggtgggacgatcacttgagcctgggaggtggagactgcggtgagccgtgatctagcctgggtgacagagtgagactctgtctcaaaaaaaaaaagtaaaaaaaatccagctttaccccgtataatgtcacccagttttcatgcccataaaattggaatggaaactactccatagaggctaagaaatattattcataaagcatagtactcggcatgtagtaagtgtctataaatgttagtctgcatttacttatttatttatttagagatggagtttcacgcttgttgcccaggctggagtgcagtggtgcaatctcagctcactgcaacctctacctcccaggttcaagcgattctcctgcctcagcctcccgagcagctgggattacaggcgcctaccaccacaccagctaatcttgtattttcagtagagatggggtttcatcatgttggccaagctggtctcaaattccttatgtcaggtgatccaccgcccttgacctcccaaagtgttgggattacaggcgtgagcctctgcacccagccaaatattagtcattaagccaaccattaataaatgctattatcattaaaggaaatattgaaaatagtatcttttttgttttatttttggttttgtttttgaaacagggttttgctctgatgctcaggctggagtgcggtgctgtgatcatagctcactgcagccttgaacttctgggctcaagcactccgccttcctcagccttctaagtagctgggactacaggtgtgcaccaccatacccagcttttttttttttaattatcattttactttctgtaggggcagggtcttgctctgttgcccaggctggagtacagtggcatggtcatggctcactgtagccttcaactcttgggctcaagcaatcctccttcctcagcctccaaaaatggtgagattatgggtttgagccactgtgcccagccctggattcaataccataaagggttagattgcacaggaggctgccaagttgaattaagtggggttttatattagtgagaatttgccttccttctcagtattaatctacatttaggtcatagaccccatatccaacttactgtctataatttctcttacataggggggcacatttagataagcacagactaattggggttatagtcatagctttagaatagtttaaagacctagctgacggccaggcgtggtggctcacgcctgtaatcccagtacttcgggaggtcgaggtgggaggatcacttgaggtcaggaattcgagaccagccgggccaacatggtgaaaccccttctctactaaaaatagaaaaattagccatgtgtggtgacaggtgcctataatcccaactactcaggaggctgaagcaggagaatcacttgaacctggttgcagtgagccatgatcgtgccactgcactccagcctgggtgacagagcaagaaaaaaaagatctagctgagggagttgggaccagatgattttctccagtgatgtttgaacaaaaagaaaaaatgcagctgggcgcggtggctcatgcctgtaatcccagcactttgggaggccagggtgaacggatcacgaggtcaggagttcaagactagcctggccaacatagtgaaaccccatctctattaaaaatacaaaaaattagccaggcgtggtggcatgcacctataatcccagctacttgggaggctgaggcaggagaatcatttgaacccaggacacagaggttgctgtgccactgcactccagcctgggcaacagtgcgagactgtgtctcaaaaaaaaaaaaaatgcagaagctacttaggttgaacacagaaaggaagaaggactgtgtagttcagtagtgtgtgttctgagaaagccctcacagcgttggtctctagtaatctctggaaataagtgaatcattccagcttgaattatcatgatgcaaaattgtgttcgctgaaaagcaggggttaagtccgctgccttgtgaatttccgcctggaaatgcatctgacccatggtggttgctcaattctgagtgagtttggagaaggaaggaaaatgaggagttacttattagttagtcgttatacatttttggtttttaaacccaatatataattcctggatattcctaccacttactatttgttgtcgttgtttctattgtttttgagagaaggtcttgctccattgcccaggctggagtgcagtggcgtgatcatggctcactgcagtctttacctccagggttcaaggaatcctcacacctcagcctcctgagtagctggaattactaccatgcccagctaacgtctatattttttggaggtagggttttgccatgttgcccaggctggtcttgaactcatgagctcaagtgatactcctgcctcagcctcccaatgtgctgggattacaggcataagccatcgtgcctggcctcagtgagtggttttgtgggctggagtaaggatccagctgtcttcgctgcaggagtgacagggacgtggtgtccatctcagaggagccaagtgggcttgcctaggctttcgattcttgtgaagatgagtgaactgaaaccagacacctcttagatctatgggcccttctacctctgatgatctgtgagattcagtgaaggtgaacagtcactgtcggggatgttttaatgattttactaaaaatcggaatagaatgtgaaacagggggatctgaagagtgattatttgtactgttctggtcaggagctgggagctttgtctggcctccacgtaggggcctgaggacaagaactaggcagaggtgcagacagcgaagaggaggatggctcctgggtgttcaggccatggccagcctggtcagcagagcagctgtgggaaaagggatgatatttggtggtagcactgaggcccagccaacactgagcgcttaggatgtttcctgctgccctggcattgttttgttatttattccagcgactgtcctgtgggcaggaactgtaatgtccatgggcaggagaagaaacccaggtcacagggacctgcccaaggccacagaaggcccgaggctggcgggacctaggtcagcctgacttccccggccagtgccctctctgtttgtctcgtgtcatctgccttgggagctcacatttcagggcatgtggcccagtgcccactgaggtgcagcccgcgtgcctggacggctctgtcagggcgagcttctcgggcagtcttccttccctctccatttgttgctgcaggattctcctttggtcctgacttttctggtttttcatttccttacctgtaatctgttcactcttggtcagcaagagaataatattgcagctaccactgcctctgagtttcctcctggaagactgagtcttatgaagacccggttttgaggagtttcctggctggatcagcaaaaccacagtgatccacatttgattgatgtattttgagtttacatttattcccaatgtttattttcttgtaaaaatgagcgcattattgattaaaagagagagacacaatatccaaaaggtggaagtagcctaggtgtccatccgtggatgaatgaatgaacaaatgtggtctgtgtgctcagtggagtattactcagccttaaaaaggaagtcttgcactgctacaacagatgaatcctgaagacattacgctaagtgaaacaagccagtcaccaaaggacaaacactctatgatcccacttctgtggggcccccagagccgtcaaattcatgacgacagaaagcagaagaggggttgccaggtggtggggccaggatcggggtgcgggaggatggggagttagagtttaatgggtgcagagtttcagttttgcacgatgaaaacagttgtagagattagtttcacaacagtgtgaacacatttactatcactgaactgtacacttaaaaatggttaagatggctaattttatatgtattttatcacaatttaaagaagagaaaaatggagaggcagtgtacaagcttagtaagtagaaagtaaattgtgaaaacctttttcctaacacttcattctatttgcttctttggccaaaggtgtaagtagcattgatggacgattaggtagaactagccatccagaattggttctacaagattgcctttctggctcttcagtgtttctctttgcccaagcctcagtgttatcctgctatcacagcagggctgatcactaaggagaaggttatccttggtgaggaggtggaaaatggtgatttttaaatgttgtactacaagcaaccgagttttgatctgcaaatctatcatatttataatctgcattaaaattttaagtcacattcataaaatataggagtggatgcacttttaaaatttctttggaatgcaaatcagattggattaaagctattaaccatgtgtaataaaagactgtagattttgtagcagcttcatgctctacctaagatgtctgccaagtaagtgaaatgtatttgtaaaaaggcagatggaactactagacgtattgtcatcgaactattctccaggggcactgatttcagtgcaggtgctttagatgggaggaaggctgagagcagggtctgtggggcccctattgcagagaagctccgtttcatctactttatatttgatttgtaaatgtttgatttgcttggctaaagaattctgaggctagagcaacaaaacaaaacagaaggagagaggttgggaagaaaacgtgaagtaacaccaaaaaactaactgctattgcaaaacaaggataaaatagataattcaagatagatgtgattgattgccataaagattcatgaacacgtcaggtgaacccgagtctggaggctagaggaagaggagccgacggaatttgaggaggatgtgtgtctggtctgaagaggaggtagagacttcctgcgaaggctagcagagtaaaggtttgctttctccctttcctccccgaagaccagcacatcagatgaaaagaaccccccaaatcaagtaaaacttttatctgcagtgaaattaagagataactcatatccccaactatagaaaactgccgaatataatataaatccagaccacatggagggaaagacttcgagagctggtccatacctctcagctctcctgcctgttcgcctcccaaatgcccaacctccaaataccatcacatgtgggttagggttgccaggagtaaatttccttgttaataaaatgaatgagataggaaagaaagcggcaatgttttcattatttgcagataaaatactggtcaacttcactaaacaaatgtaaattccctgtggagggagctataaagctttactgaagggcataaaagaagacatgaataaatggagaaagatactagatccttggattggaaaagttggcagcattctttattccaaactccctcaaacaaatctataaatttaacacagtctcaggaaacatcccagcaagatttcttaaatacaacgtgtccagctgattataaaatttatatgaaagagttattgtacaagaatagccaagataattttttaaaaggagacttaagaaaggggaacttgccttatcagaaatcaaaacaaactagagacacactggcacggaagctaaagcagtgatgttcattgcagccctgttgtgtgtagcagtgaaaaattacttgctgaaatgcagccaaggtattaggaatggggaggctgtggcataaaaagattggcattagcattgaatcctttcaaatatcatgtacagctaaacagctgtgagaattatggagtagaatgtaagtgttatgtgccttaacaatgccaaactaataaatcctcttcgaagagagaagtagatctgtgctgatatggaaaaatgtctaaacagatatgcgtccctgcagaaacagctgcagaggagtatccatggtatgatcccacgtgtgttcagcacactgctctgttctttcctgtactgagggagcccatttctggtgaggattatttccaccaccccgatgacacaggcttggctatgagacttgctttgatcaagaatatgtgactcgaagtcactatgcaacttccacacagaggcattaagagccattacgtggttctgtcattactttttgccccctgccacgaggctggcatgaaccacatagaggttttgccttcggcctgcatgtccaattgaagcatacatatagaatttcggccaacttgcagctgacatgtaatgtgaacagcaaacaaataactatttgtttgttacagcataacagcttaaacagcaccaaaccaagcataagtgttttatacatatacatttgaacatggctaaaatatatctcctatatcctagatacacttttctcatgtgtataaacagacatgtacaaggatgcctgatgaagcattgctattacagcaaaaaactgaaaacaatctgaatatatatcagtaagtgtcttagccagtttaggttgctgtaacagaataccatagaatgtgtggctttaacaacgcttatttctcaaagttctggaagccaggaagcccaagatcacggcactggcagattggtgtctggtgagagacccaagcctgctttgcagaagaccatcatctcactgcatccactcatggggtgggtgtagggagatatctattctgtcttttcttttcttttttttgaggcagagttttgctcttgttgcccaggctggaatgcaatggcgcaacctcggctcactgcaacctccgcctcctgggttcaggcaattctcctgcctcagcctcctgagttgctgggattacaggcatgcaccaccatgctcggctaatttttgtatctttagtagagatgggggggtttcaccatgttggtcagtctggtctcgaactcttgacctcaggtgatccccctgcctcggcctccgaaagggctgggattacaagagtgagccaccgtgcccagcctctgtctcttcttataagggtactaatcccattcatgagggctccgtccgatggcctgttcacctcccaaatgcccaacctccaaataccatcacatgtgggttaggattgcaagatctaaatttgggttattcacagacgtttagtccataaccataaagaaatgaacaagtaaaatgtgatttattaatataatggaaaactgtaaatcaactcaaataaagcagatccacatgtataattaaaactgggaaacataataggcaaaaaagagactggaattgtgggttacacagaggcatctactgtatctgcaatgttgtatttctttaaaaacatctgaaggaaatatggtaaaacaaagatttgaaaaagctggtggtgggtttaagagtgtttgctatatatttttttctcagtgactgaaatatttcatattttttaaagaaagcattcatgtaaatctttaaaattgcaaagcaatgcttatgttcttcagaggaacatttatccctgtgtgtagaagtatatagattaattggaaggatatacactaaattcaatatagtgattggatagcagatggtgggggaataaacagaattgttacagtgtcctttgtgtttttatgtaattttaaaatttctaaaaataaaaatgttaattaatgcagtggaagatatctggaaaaacaggaaaattgttagccacctctgcccctggagatgggatcatggtgatggtggagactttttgtttgtttgtttgtttctttctttctttcttttttgagacggagttttgctcttattgcccaggctggagtgcaatggtgcaatctcggctcactgcaacctcctccttccgggttcaagcgattcttctgcttcagcctccccagtagctgggattacaggcatgtgccaccacgctggctaattttgtatttttagtagagatggggtttctccatgttggtcaggctggtctcgaactcccgacctaaggtcatccgcccgcctcggcctcccaaaatgctgggattacaggcgtgagccaccgcgcctagctgagaccttttgtttctacgtgacattcttctgtaccgtttgcctgtttgaaaaaaaaaatttttttttgagatagggttttgctttgtcacccaggttggagtgtggtggtgcgatcataactcgcttgcaggcctgaagtcccaggctcaagtgatcctcctacctcagcctctggagtagctgagactacaggcgagggccaccaagcccagctaattattattttatttaagagatgtggtgttactatgttgcccaggctggtattgaactcctgagctcaagccatactccgacctcacaaagggctgggattacaggccagagccaccatgcctggcctgtttgaatttttgtagcaattaaaaattgcgtaatttaaacacaaattgaaggggacagggactaaaaacataaatgagagttagaatgcagtgccacgttgaatgctttcacaggtaggagcctagaaatcatctgttccaactactgcacttttgagttgtggagaccagaccaagagaggtgaaatgactgttggctaaggcgtccacctctacttgcgtctggaattgcccctgcctctgcctttaagtctggtctgcgtggcttctgatagcgaagccaggggcggaccccgttcactgcatcaggagagccctgagcagcgcttggcaggaactctgcagcccagggcgccctctagaggctggaggaccttcgtcaagaccccggggggtgtggatgtggacctggaggagtggtgggcagaaggcggagccaccctttcacccagtcaattgcattcctctgtctttaatgttgggcttcctcagattagattttctttgaagaaagagttctgcagcttaaaaaaaaagtgacagaagaatcactggtgcagagtaaggtatagcgttagcatttgatctgatattatctagattcttttcacactaggaagcacctaagtcatctggtctaacaccttccttttacaaagaagatctgaggcctatataggcaaaatgtgtgctgcccaggtccacgactgcagggcattgtctcctggccctggtaatgtggtcttcattcttattttttgttttgttttgtgttaactgaacttagaactaaacagatcccttgcaacttggcttagactccatatttcatgcaaaaagctttcagggtagcagggtgactcggtggattagcaggagaagaagatgtaaagtgatggcgattggagcttaacctcggtttgattaagtaatcccccagacacccccgagaggggaaaacagtccccacgtataaatttctacacccttgctcgcctcctcttctgaaaggcgtaaatctcccctgaaatgcctccctagcattcagggcaataaagaggtcacattatatctccataaatctcccagctggctgctgctgctgccattccagaggcgaaggggaagttgtttcctcctgacggcaggccatgggcctggaaggaaaagcctctccctgcagacccattgtctcggtccctgagggagctgccctggcaatttattcaatattccctttccgtcctgccagctcctaactggggttgcagagtcaaatggcccagactagcccagcttaagtctcctctggccaaagctccattgcaatcttcctaataaataaaagaaaccaggaccatatcacagcattagaagccaggccagggttccctggggctgaggctggggctcgctgggacaggagctagggtgctgtgaaagatgacagcgggtcaacagcttcaggagtgcagcaaagctgaggacccacttgggaaatgggttccattttcccattagggaattaagatgcttttgtaggaaaggaaggtgggagaaaagatgcttttatggaaaaatctgaaaatggaacctgcccagctttaaattaaaaatgttactgcatgaaagagtgatgatgctagcccctgacatatttatgtattttatttaacatgcaaaataatcataggacagctatggtggcgcacgcctgtaatcccagtgctttgggagcccgagcctggcggatcacctaggctcaggagttcaagaccaccctgaccaacatggtgaaaccctgtctctgctaaaaatacaaaaattagccaggcgtgatggtatatacctgtaatcccagcttttggggaggctgaggcaggagaattgcttgagcctgggaggtggaggttgcagtgagccaagatcatgccattgcactctagcctgggtgacagagcaagactctgtctcaaaaaaaaaaaaaaaaaatcactatcacaaataagaaatacattaacataaacatagttgagtatttaaaaggtacacaacagcaaacaatgagaagtccttccgtgagccaccaagacacctccctggaaacaaccagcatgatcagtttcttgtctgtcctcctaaaaatgttcattctgtatataaacaaatccatgtatagattcttctccccttctttttgtaagagaatatcaatgtaatgtccatgccttctaatatttcatagcatatactgcaagaattccatatcagtacatcaagatcattgtttatggctacatagtgtgccttaattgaattaaccagtccggtattgatgaacgtaagagttgtttttccagtcctctgctatggaaggacatgccatagtgaatatccttgtatataaaccattttacacagaagtacatctggaggataaattcctggaagtggagtttctggatcaagtgacacatgcatttatacttttgataagatattgccaaattgctttccccactggctgcggggctgtagcatgtcacacttcccatcaatgcccagggtgtctgctttcccacatcccccaaccccagggcacagtactatgactgaggcaagctgggaggagcctggagaggggcatcatcacaacacagtgacttggaggatccaggaccagtgccagactttgtccacagcgtgactggaaagctcttcatgtacattctaccctggctgggactgtaccccgaagggagggcctctccctttctttctgtagagtgggaggaacagttggtgccacagcgatgcctgagcccagatggggatgccactgtggtgggaggcagctgggaccgaggtggaaaaagtactttgtactttttctttccggccaggaggatcccaggaaattgaagaaaataaacatctccaatcctgcagtgcctaggcagagatgcttgcttaattaactgcatatttaactaatttaaaccatgttacaggaagagaaaatctgaagaacatagtctatccaattgtcatgtaataaaccaactccaatttccgtatggctttggtgaaactttgtttttgtactcattcctctaccattgggcgttttggttgtttccagtatttggcaggaatacctgaaaaatagatattttccctttaaaaaagtttattccagtgaattattagagcagttttattgctagcaagagtgggctggcttttagtgcaacgtggtgtgattttccatatacatccatcatatatgattttatatacacacatgtatgtgtacacacacacacacggaaacttctggccctgcatagataattctcacagctgaattatattgtgtgtccaggaacatggcatctcagtggccgggcagcccagctggccggaagccgagccctgggagtgacgctgtcccatcgtcatttcggccgcctcatgggactctctaggcactgggtttgttgaaactcgatggctctgtgtgcagagcttctgtcgtgtgcggagcttctgtcgtgtgcggaggagtttctgtcgtgtgcggaaggcgaggactgggagctcagatgaggcacttgcccggcctgctctgcaccttggttttctcttatggatattcacgaaatagcccagacccagcttgcaggttttaagactgtaccactgtgccacctgccccttgctcctggaccctcgcagcctctcccacagaaggactggggatgtgcagagagagccgactcaacaaggcagtggacagggaagcagcggcgggggcacccttcgcatgcagtccccagaggccaggaaggagcaaatattttcaagtgctgatccccagccagggctcccctggttgtatctgagcctgaagccggaagccccaggagctgcaggacccagtgcccaatgcgttgtcctggcctctttcctggcatgctgcgtgtggcttttctggaagggggcaagtcagccgtactacctgtcagccgggacactagggagacacagagaggagggatcagcatgtcacggatgcaggtctcacagtgaggtctgcagagggtggccacacaccctggtgtgaagactgtgctttcagaataattagtaatatgccccctcccctcagaagtgtcccattttgtatggtaggtcacagggctcccatattaatccggggaggcggacggcacaaagaggagaaccttgtcccaggtttcggggtggggactgctgggcagggtccctgcaaacacagcagctgggaggcccaggcccctccactctgggactgatcgtagcttcccacatggaggcccccatgaaaactccatagttctttcacctgagggtgacagctggcaagacagtctttgtaaaaaatgtattggtataggggcaaaatgctgccattcgggagagttttcaaatagaaatgtagagctcactgcagtctttcagtattgccttcttttctttgttccttttccgtttttttttttggagacacggtctcactctgtcgcccagactgtagtacagtggcatgatcacggctcactgcaacctctgcctcctgggttcgagcaattctcctgcctcagcctcccgagtagctggaattacaggcgtgcaccaacatgcccacctactttttatatttttagtagagacaggctttcaccatgttggccaggctggccttgaactcctgacctcaagtgttccatccgcttcggcctcccaaagtgctgcgattacaggcatgagccaccacacctgaccctttgcctgtttttaaaatggtatcccagcctgcggttctctggtgggaaggggccatggtgaccattttctgggagtctgcatgtttagtgtcgagatgcagcaaatgaagtcttattcaccaccatacttttgtttcacttgtttcaagaaagtgcttgtggccagaagtggtggctcatgcctgtaataccaatactttgggaggctgaggcgggaggattgcttgaactcaggagttcaagatcagcctgggcaacatagtgagaccccatctctacaaaatgctagaaaaattagctgagcgtggtggtgtgcaactgtagtcccagctactcaggaggttcaggcaggaggatcgcctggggccgcgaagtcaaggctgcaattagctatgactgagctgctggactccagcctgggtgacagagcaagaccccattgaaaaaaacaaacaaacaaaaaaagtccctgtgagagcaatgcaacagtccacaagttcgcggacttagctctatggcattgtgattgcagaggctcagatttgaattcagaagcatcctacatttctcctggagccagcaactgatcctgcattttatggggaaatctttatgctgtaattataggcccacatggaggggttctcgaaggtctcaaaatctaatcttgacaatgatgaaggccaggaagcgtttcccaagtgggtgagctgagaagcattgagacagagatgttgggaagtttctgagatcagacaagatgggaaaacagcatgcttgcgctctgaactcctgcagcccttgctgctctcaggccaaattgagactgattttccatctgctgccagcttttgccgctggggaaggggtcagggatggccaaggcatctgtgggcagcgctggtgggacgctggcctgcggttaagagactgactgcccagcctgggttcgatcccactttgctgttgattagctctgtggccctgggcaggatctgttctctaaagctcatgaactttcctccattgccatcctctcctggaccagcctcccacgctcaccctactatgagcacagaccaggcaggtgtggaggtgctgggagttcttagacctccagggaggagccgctggggcccagggtgtcaggggcttgagtctttccacagttcctccagtgacaggtgtggttgcctgttacagccttcacgctcatctttctctttgtcatttgtaaaacctctttgcatatgagcgggtgtattttcccctatcatttgttcttcaacctcttcctcctctatctctctacgttcccccctccctccgttcttgtttttggtgttttgttttttttttttcctttccctttccctttcacaatgtccttgcctgtttgtgatttaggaaaaacaaaacaaaacaaaactgagtcacattctgtcactccagccagctgacgtcctgggttcttgtcctttataagggtcagaagcagaggccttggactctgtggggtgactgcaaggtgggcggtaactggtaaccgcctctgttcagcagctgcaggagcttccaaaataggtgatttcatccccggccggagcgccgctggagctgtgtgggcctccccgtgacagcctcctgtcacaggcatctgccgagcctgacgaagcccagaagacccagggctcaagagctgccaggaaaacctcaggctttgtttgggcctcgtgccccacacccaggcgccagccgcagggacagatccgggcctgtcgggaaatccaggctccatctctggtgaactctggatgggacatgggcctggggttcagcaagggacatttgggtggggctgagactttgctctgaagcccctttggttcccagggaacggtttctgggcaggtccctcccctcctgcccagtctgggctggggtctggccttttccaagaaagccttctgtgttgtatctccttggccccctctggcccctcttgtgtagcactgcccagctgccccgggcacgggccctttccactgttgacgtgtctctccctgaacgtccaggatgctgaagatctgaagctggaggtggtgggctgggcaccactgtgaggcccaggcccactgccgtttgtcatcacaaaggtagtgattatttttgagttgtgcatccccagctagaccaaaacaactttgggcaaggagttagcatggattttgccaacatgttcgttacgtctagcacttggacaggggcgcgtatacagacgcatggcagatatttgagtttcaggcattgctgtgaaggggctgagacccatcaactctgcctccaggcatgagggtgagggtcttccaacacaggctggggctcaacaccagctctccccagcaggtggaagtctgaggggagcatctgcaggagagcagaccaggctctgtggcgccgatggggcggcagcagtggcctgagctgtctccccagcggccagcagtgcccaggggagggagtggagagcggaaccgtgaccctggcctctgattcctctccctttcttcctcccgtgccttccctctccccgccctgactggcctccccttgttggggtgggtgggttccccaagatggatggagcaggtcagaggagaggagaggtcggtgtctttgcctctggctgcgtcagttctttgtagggaagtcaggggtgggatgtttcaacctcctggcctgcattcttctttcaggcactagggtgggagcagcttgtttaattgataggaatatccatactgcaccggctcgctgagaaatcagactatcagactttgtttcctctttaaaaaaaactttttttagcaaggtatgggaggaagtgaagagtgagatccccatccttggagttaggacaaaatttattttgtgcttttcattgctaaactaatcattaattaatacttcccatgagaagcaacttggagactgagtacaagtgaacgcggtcagccttgctgtcagttggttcctggcttgcagtctcaaacctgaccgctgagagcacagacaattctgagtatagccccagtggtttaagaaaggtcagattccccagtctcctagctcttttatctgtcctcccctcctccaataaccagcgccaaagtttgtcctggtctttcccactccctcctgacccctccaacttcagcctcctaacaataatccatcattgttatctcatttgatgtttgcaaagcactttacagccattgttgtaagtttttcctctcatttgcaaagtactttacaactattattacaagtctttcctccaaacgtgggtgatgccttccaagtggctggaggagttcccgggatgccagcactgggtgggaggggctgcatccgaggccacagctgtgccccctggcttcggaatcactcttgcccccagggaagttcctctcagtgcctttcgtaggaaggaatgagaagtggtgcttaccgaggttcataccagatgtcagtgctagtttgggacttagttagtgctgtgtttgtgatttaacattgtagggccaacgttttcctctatggttaccttgttttggtaataattgtttaaaaatatgtgtaacatttcatggagcaggttggatggcaggattttgtggttggaaatatggaaacttctgccgatttggaggtgtaggaggttgactattggatgtctttaggaagcatagcctttactttggctgttttggtaacccctgacccttctatcgcaatgggacttctatgctggtgggaattccacactttctgccctagacaattagggtctgccatgagtcccccactctgctgagggtgtgttctaaaaatgaactaatattattagtcattattgatattcaaatccaatttgtccaaatagatcattagcactctgagacctgggttccctcctagctcctgtgacatctatcagagtgattaaatagcagatgctcagtaaatatttgttggtggcaaatacatacttggcaacctccagtgactttacctggacagtaaaataattgcttgaatgcataacccaactttgaggtgagcctgcaggagctgctgaggcacacctgtgtgttgggctctcaaggcagccagaggtgagtcggcagctgagatcacgctccagggattcctgcgtcctttaataagattctggggtgggcacagttctggggtggacatggtggctcacgcccataatcccagaactttggaaggctgaggtgggaggatcgcttgagcttaggagttcaagaccagtctgtacaacacagtgagagcttgtctctaccaaaaaaaaaaaaaaaaaaaaaaaaattagcaaggcatggcagcatgcacctgtagtcccagatacttgggaggctgaggtgggaggattgcttgagcctaggaggttgaggctgcagtgagccgagatcgcagcactgtactccagcctgggggacagagtgagaccctgtctcacaaaaagtttttctttacatcagtgtagtgtgggaaaaagaaaaaaaagactccattcctgcatataaaacaataattgtgaggagaaaagagaatctcccctccgaacaagaggaacacattatgagatgtttttcacttaaatgaaccagaatgtaggagagaggccagtttgcttatttttaggagtgtgactctatctgttagaggaacatactgagatatttatgaataaaataatagaagtctgggattttcttcagtaacacaatgtgggggaaagtgaatggaggtacaggtaagacaagattgaccacaaatgattggaagctggatgatagttaagagttcgttttcatattctgtccccttctgaatatgtttaaattttttcataataaagaaaaatagggctgggtgcagtggcttatgcctgtaatcccagcattttgggaggccgaggcaggaggatcacttgaacccaggaatttgagaccagcctgggcaacacagtgaaaccttgtctctacaaaaattagctggggatggtagcgtgtgcctgtggtcccaggttctaaggaagctagaggttgcaatgcccactgcactgcagcctgggtgacagagtgagactctgtctcaaaaaaaaaaggaaaaaaaaagatagaaaaagtaaaatagactgaggcaggagtatctcttgaggccaggagttggtggctgcagtgagctgtgattgcaccactacactccggcttgggtgagagtgaacccggtctctaaagagcaaaataaaataaaaaaggaaaccagaatgggagggttgcactaggtttggaatggaaaggtgatcttacaaggcctctatgtccaagtgcgattcaggctagaccgcgtgtcttggttcaattttgagatggtagcgccacccagtgtttattgcgaacacccaacaaaacgacgacgttgcccgcgcccgcctcttgctgtggagtgggcttggtctaatgtccttctgtaaattcctggcctctttaatcccctcatgggcaggcctggatgaaagaagcggggctgacagcccataggcacggactgtagaggtggcaacagtagtgttgattgtggtggtccagctgggagcaagctatgggcgggagtggccgcatctcatgggcggctctgagggcaggcgaccttggtggaggctgtcagtgtgacccaggtgtaaaaatagcctctgctgtgacgcctgtgctccgctccctggcctgagcaaatagccccttacacctgcacactgtttacttggtgtggacacacagctacctgtttgcaggtgcaaatgactgtttgtgtacccagagttgtggggagggccccccaccatcctcttctctggcccacattcccctagagcaagtagctgggccacataactagcaaaatgcgcaacctcaacccactcccgagctgggtcctgttggaaagagagctctttaccacctgtcctcccaactcaataaaagcacccctcttcactagagaaaaatctgcccttgcctctggcagcagcataggaagaatctggagaccaaggtagatgtgttttgggacagcaaattaggataacatgaagtcagagagacttctggagatggtgagccaggctttatagagactacggggagcaagaaaactggcccagcctgtctcacgagggtgaggagaatggacacaggtggaatctgtcaattgtaacattctgtagacatggatgataaaggtgatggcggggaggggtgagcgagtgaagggagcggcagaccccggcagccttgtggtagctggggagatgctacgcttatgtgagcagctctaaagtgccattgcttataatatgcacctttattttatataccaataagcaagaaaaatgtccaactatgatatggcagcccatacaggtatattaaaacagaaaaaatgaatgaatgaagctttttttgcaggacagttagcaaattccaagaactgaaaaagaaatttagtgcctttgactcagaaattctacttctcagagagtatcttaaggaataactagaaatgcacagacttaagtaaggagcagtgtttatgaaacaagaatccaaaactggatgaagattaatagctgaatgatactagttaaatgatggcacctttatatgatggaacaatggtatatgagtgtataaagaattttataaaatgagtttataaagaatttgtcattgggaaaatgttttggtattaagcaaacgacccacacagactcagaattatatagcttggcaaaaatatggatcaacatatgaaagtctcacaaggccgggtgtggtgtactcacccagtactttgggaggctgaggcgggtggaccatttgaggtcaggagtttgagaccagcctgatgaaaccccgtctctactaaaagcacaaaattagccgtgtgtggtggcgcatgcctgtaatcctagctacttcggaggctgaggcaggagaatcgcgtgaacgtgggaggcagaggttgcagtgagctgagatcgcaccattgcactctagcctgggcaacaagagtgaaactccgtctcaaaaagagaaaagaagtctcacaaagggctgggcacagtggctcatgcatgtagtctcagcactttgggaggctgaggctggagtatcgcttgagcccaggggttcaaggctggactgagttatgactgcaccactgtactccagcctgggtgacagagtgaccctgtctctaataaaaagaataaaataaatacagtcttacaaaggatacaatagaaccaaatgctcaaaacattagtgacaatctggattttctttatatattttggcactaattttcctaaggtaaatatttattatatctttatgcaaaaggaaaagtaatcttactaactttgaaagggaaaaagagagagcaaggtttgcgtggacctcagtgtgaggtgagaggcctagggctggaggctctgaatgtgatacctgcactgaaatccaggtgtcccgcctcccagcccaggacgtgggtgatcactgcaactttttcctcttctcgtgctcaggggaactctcagtgtctgggattagggagcaggggctgaagtcagagtgaggaagagcaagagcagcccgaggtggtcttctctttccaaggaaagggcattgtttctgtgcgctctagattctcagatgtgagagctgggcataaacaaagaattaatcctctgtgtcttttcttgtctgttccccccaactcagtagatatgtttgacgacttctcagaaggcagagagtgtgtcaactgtggggctatgtccaccccgctctggaggcgagatgggacgggtcactatctgtgcaacgcctgcggcctctaccacaagatgaacggcatcaaccggccgctcatcaagcctcagcgccggctggtaagcacgtgcctcgcagcctcctctgggcacctggctgcggagctctcgccttggtgggacatcctctggttttgaattttggaacttgagggtgtgcatcggggattacgtgggtgagagccccataataattctcacaactttagagttagctggagccaccagaatgatccaggctgtctagttcaacctcttcggcacacagaaactgaaagtgaggctcagaaaagctagtggccttgcccacagccactcaggtactgagtctcccatctagaactctggaaccagaatccaggtttcctggttcccagtccagtgttgactggagtgtctcctccacccacaccaaccctgcaaggaaggtcacctcagaggctggtctctaccctgacctcagttgatcagttgataaatcccaaagcccagaagtgcaagcagcttgtgttgggccccgtggctagggaagagtttgggcctggggcttggctcctggcttcctgctcctttttaatataatttgattctggtcaacaccaaccagcttgcactatattaaggagggaagaacagaggggataaacctggtgcctccctttcttgaggtcccagggccattcagactttgataccatttggacaccgtgattcctcactctctgcctgcccccggcacctgcagccccggtcagttctcctctcaggagaagctttcctgccggcagtgcccggcgctcactggttattcgcctgacggtgaatgatggttaggactggaaaccaggtctcgatgcccacgttcgctctcctcgggcagcagaaaccttgttctgatttattcctcgcagtggcgcaggtgacaggagagttaggtgccgtcacaggtcagagatctcatgcagggtcgttagggcccagccctgcctcccgttagggaggcccagctccgcagccacacgcgaggtggaagggcagtgcacaccttttacttggacatgaagcatttgtttcctgtcttgcagtccgcctcccgccgagtgggcctctcctgtgccaactgccagaccaccaccaccacgctgtggcgccgcaatgcggagggcgagcctgtgtgcaatgcctgcggcctctacatgaagctccacggggtacgtgggtcctgcgcccatgcggcatccttgccttctgatgcccatctctcagtcctcccttgtcttcttcctttgtactagcattcatttttccttcttaacaaagagacttagatttggaaggggctttcaactactttgctggcctcttccgtcctttacattgtataagtgaattttccgttttacagatgagcaggctacatttatatgtagcagtttgatgtgtaacaaaggtgacgtttcgattcagtggataagaagcttaaggatagttgtattgacaaaattggctgttcatttggaaaacagaaggaaagcatgacctctacctcctaccttaaacaaaaataaacttgggtgaattaaggatattacatgtaaaacatctttgaaataaactaaaagtaaggccaggcatcatgactcatgcctgtaattgcagcactttgggaggctgaggcagaaggattgcatgagctcaggatttcaaaaccaacctggacaacatggtgaaactttgtctctactaaaaaaaaaaaaaaaaaaaaaaaaaatctagctgggcatggtggtgcatgcctctagtcccagctactcaggagtctgaggtaggaggatggcttgagctcaggagtttgaggctgcagtgagctctgattgtcccactgcactccagcctgagtgacaaagtgagaccctgtctccaaaaaaataaaaatattagataataaaatactgcaaagaaaatcagacaataaaaacactggaagaaaatgtaagggaaagtatttatataactttggggatgggagaacttcttaaacaagattttaaaactttttagccatataagaatagttagatatatttgattttgtaaatatttactgtttgtgcctggaaatgatacctagggaaagtaaagaccaatacacacagtatcagaaaaagggttaatatttccagaattacaaggagcttctacaaagctctttaatttttattggaacattctccattatacaatattaacaaaaaggcaaggtgcccaacactacctactatggcactatttttataaatatgaggaagaatataatttataggtggttgcttccacatatacagaacacctctggtaggatatgtagagattggtcacatggtcacatgtatgcatatatacgtacatggggtgcctccaggagaaaaactggggtcctggggagaagggattggaaggacactctttttgctgtgtacccccttggtaccttagacgggacatatgcaagtcttaattgttcaaatacaagttaaattaaaaccaaaccaaaccagaaacagataggtcttgtagcctaataagaaaagaacaattgatctttccccacttcccccaaatgggcaaaagatatggactgacatctcacagaagctgcccagatagccatgaaacatgtgcacatatgctgaatctcactaaaaatcagagaaatgtacctgaaaatgaccatgaaagtccctagtttgcccatatacttggcaaaaattaaagtgtttgctgctatggatttggggaattagatactctcatatattattgatctgtatttgaattactgcatctattaacttagtggtattttttaaggttgaaaccatgaacaccattatatctggcaggtctactgttgggaaactagcctataaaaaataaccagtacatgatgacctttgaaccatttattgctgcattgtttgtggtggcaaaaactagaaacaaccttaaaaccccataaaggaatggttgaaaaaattctgctatatcccaaaatgtggaatattgagaagaaacttaaaaataataatctagggccatgtatcttgatctagaaaatgaaaaagcacattgcaaagaaatatatgtagcatgaccccatactatgagtgtcgaaggtgcattaaacagacatacatatggatgggtggacagaccagtggatgggtgaacacacacacacaaatatacacgtataggtgtattagtctgttttcacactgctgataaagacatacccaaaattaaaaagtggcttaatggactcacagttccacatcgctggggaggcctcacaatcatggcggaaggtgaaaggcacgtcttacatggcagcaggcaagagagaatgagagccaagcaaaaggggtttccccttataaaaccatcagctctcatgagacttactcactatagtgagaacagtatgggagaaaccgcccctgtgactcagttatctcccatcaggtcggtcccacaacatgtgggaattatgggagctacaattcaagatgagattttggtggggacacagccaaaccaagtcaatagatatatatgtgtacagatgtttgagaatttttttaaatgtaagaatatataacaggctgttaaatccatttgcctcactgggataggattgacggtagtagagtgagagggctgttgttaacttagtctcatgtatcttttcatgatttcttgttataatgaacaagcaaatggctaaagttatgaacattcataagaaaatatttctacaaagcatgtatacaaggatgtttgttaatcactgtaatagcaaaaatggaggaaagaaaacctttggaaggaaaatggttaaactattgttcttcaatatgggaatggtacaagaaacttattgggaaatattatataggtattaaaaagattatattctcagaaaataaaaaaatagaattaccacatgatccagcgtaccatttctggatatatacccaaaataattaaaggcagggcctcaaagagctatttgtacactgctgtttatagcagcatgattcacaattgcagaaagatgtaaacaacccaagtgtccacggagaaatgaacggataaacacagtgtgatatacatacacgtaggatattactcagcctttaaaaggaagggaattctggcccctgacaccacatgtcaaatccatagagacagaaagtagaatggaggctgtcgggggctagggaaagggggaatgaggagtgatgtttaatgggtatggagtttgagttttgcaagacgagaagagttctggggatggtggtcaggcttgcagaacggtgtgaatgcgcttaacactacagagcaatatacttcagaatggttcagatggtaaattttaagttaggtgtgtttcattttactgcaactgaaaaaaaaaaagcatacctaagtgaatggagattaacgtgagggggagattcttctgaggccagaatgggtttgaacatttgaggcatagctagggggatggggtgggggaggacacccttccacaaggtgggaaataggggtctgggtgtagagtcacagagagatgtgcagatggtggggtcggggggtgcaagtgccaccccatctacccacagttaaataggaggccagttcaagttcacatatgctggtgcatttctcgcttaaccattgcgtgttcatgtctctgaagcagtaattgcttttctttctgtatttgcaggtgtggcctttatcaatcccacatggtagacaagcacagcatagaaaaggggctaaaagatttggctcagcctaagagaaaccagatgtggggaaggcaccctgcagtcctgctccccaggactggcttaggcatctgtgaatggctctggggcctgcctcccaacagaactgtggtcaaagtgttgtccagggacattttatctcagaacctggtcacagggcagtctctagcatagtctcttactgctccccaccattcacagaagcaccaatggctccagccagacccaatgcagtacagagctgcaataagtagagtgatgttacatctcaactcactgggactgttgctgttgaggccaattttcccagcacaataattgatagcaccgctgcaccctcacaccttttgaagatagggccttgctccaccacccaggctggagtgcagtggcacgatcacggcttgctggagcctcgacttcctgggttcaagggatcctcctatctcagccttctgagtagctgggactacaggcatgcagcaccgtgcccagctaattttaaaacttttttgtagagatggggtctcactatgttgccaaggatggtctcgaactcctgggctcaagcagtcctcccacctcggccacccaaagtgctgggattacaggcatgagccactgtgcctggcctagcacccactttttgttttcagggtccttgtgtggatgataaaggcttttgaacagtctgtctctgctgcctgaaatgcctgcctctgtctactcaaaaccttttacaaactcaggtgtcacctccacactgaagccttccttgatatcctcacgtgcccctccttcccactcctcaccccaggacagagtttagtgtttctctgtctttttacatcaccgaccagagtctggttatttctccttgtctgtgaatttctgagggtaggagctgtgtgtctttagttccctattctccaggctctagtaaagtagccatcacatcacacaggtgctcgataagttttttaaaaatggaattgatttctttctcgctgagttccaggggcctgtgcagcccgtctgggccccaggctttgtggagagattgcttaggtgttgccttctcgcagcaggtgtgtgtctttcaatgctgtagcagactacgcagaaatggaaaaccctatatatttacttgtgaccctccaggtccccaggcctcttgcaatgcggaaagaggggatccaaaccagaaaacggaagcccaagaacctgaataaatctaagacaccagcaggtgaggaaaagatctgtgagtgattatatgagtacatcaggagccctcagagtgcctaagaatcatatcttccgggttaggcaggccagcccgggccgccagggggtggtgacagcatcggacatccctggcctttcaggacaggatgaagagcccagcaaaaaagtaacaattgccatggaacgtgttgggagctttcgaagcaggctcaactcaagctggggcctgatcattgccgactgcaaagacccagtgctcaggctggaccagccgaggtcctgcaggaaagaggaactttactcggtcctttcatctttggcgctgcagccacccaaaagctcagttcctttcaattctctttgggctaacggggatccaggagggcagggtccaattaatcatgtccctaacagattgatctctaagccaatgtataattaacatcatgcagtgctttgtgctttagaaagccccttcagaaatattatctccatgaaagtaagactccatgagaaccagtttatgaccccattttactaacaagcaaactgaggctcatagaggacaatgatttaacgagggtcatacagctgttaatgggtagagaattaaaacccaagtttttctgcttctgggtcaatgttctcttcaatataccactctgccttcttaatttctagattaagaataagggctgctcaaaagtttgaggctgcagtgacctatgatcgtgccactgcacttcagcctggagagcagagcaagaccctgtctttaaaaaaaaaaaaaagaaatacatttaaaaagaacgagggctgttcttttttaaatttatttttaataaatatattaactatttattaaatttaaattagatttatttataaaattatatataaatttctgacagaacaacggctgttctttaatacgtttatgttccctaccaaaacattcctcactcagtactgctacccagttaaagatttgactggtcggtgctgcagtcacagagaaaatgaattggctgatctgacgaaaaatttatcttctaacctaaggcatgacagagtcagataaatgggccctttccactaccaagaacatgatcaaagttctgcttttgtacattcaaccatggcttatcccttctggcaggcatatttcctactggaattttcagtgtctcacacctgtggtcttccacctctcctcctgcttccctactgctgacgagtcccctatgtcccctgggtaaccttatttcctctcacgtagcaatcacagatagagaagacatacggttcaggcgcacgattcccagtccaaaattccaaatccaggaagcaagattcggcagcaaaacctattttgaacagacactaggctgttgatagtctctgtttactccattcagtatgatattcacgtgttttgctgtggggatattattgtatttcattatagagtattatctcaggccctgctggaggtattctgtaataatacacagtatttggatttttaaaaatgtgaatcttcaagttgaatgaggaagaatctttttttaaaaagttttgaagcctgaaacacacgtggcctcaagggtttgagatgagatagggggaagaagccatccctgtgagaactgtagccctccgcagataaggacctctgctgctgtccccggcaaatgtagataaagccattagcttgcacccatcccggctgtctcgcaggctgccggctgttcgtttgtccctgccgctgatttgggtgtgctgactctgcttcattccagctccttcaggcagtgagagccttcctcccgccagcggtgcttccagcaactccagcaacgccaccaccagcagcagcgaggagatgcgtcccatcaagacggagcctggcctgtcatctcactacgggcacagcagctccgtgtcccaggtacgcgccatggctggggcgccagggctgtttgtggggaggccgactgcagagtcccagaggccagcctagtactgggtgggacttgcagccaggcctcacaggtgcaagcagtgagctaccctctgcgctaggaagacccagccattgagctgtgtggtgccctcagggccgcacgaggctaggggcatctgcatcgggctgtatttcaggacatcttatcaagatggtgatgtggacatgactgtgactcacaattttttaacagctcctctatgccatcatctttggaaacaaagagaggggagtccagggctggcatacagcatgggtggcaggggcggaaaacaacacagaagtacaacctgaatgagactgcgtgctggggcgaggggaggcgtggttgcgctgtcggaggccgagcggaggttctctaggcaagtctgcctcctacgtgcagggaggttagacttcaacagggagggtggggaaggaggaggaagctggcatggggaaaggcctggatcctgcagagggcaggcagggcaggctggtggggaggtcacaggcaggatgccactttcatgagacccagctctgcacgtgtgtcaggggacgccctggggcagcccatgttccctctggcggaggacgatggcgtctcggcctccctgcctcctcccctctgcagttccctctcttgggaccaggatgcaccaagcttgatcacggtctcctttgaccagccctggctgttatctcgtctctgctcttaactgaaggaggccgtgtcttagtgagcttcttattgtctgggagaacctgatcccacagaaccaggggcaccaggagccccttctgggccgggtggatggcttctttgttggaaagtggatgtggtggtgataggatggtagaaagtgtctcctgtaaccatcagagccttctgggcaaccacagtatccacagggccaccgggtcatagccctggttgtatactgtgctcagaagcagctgatgcatcacccagacccttcatgcctagatcaccgggatcaggagaaacagagagaagtgctccttggtcccttcctgagggctgaagccatcctggggacatctgcatagcagggcaccctccccagcctagacctcccaagccctcaggagcgtctccatgggcctcatcgtgtgctttctgcttttcagacgttctcagtcagtgcgatgtctggccatgggccctccatccaccctgtcctctcggccctgaagctctccccacaaggctatgcgtctcccgtcagccagtctccacagaccagctccaagcaggactcttggaacagcctggtcttggccgacagtcacggggacataatcactgcgtaatcttccctcttccctcctcaaattcctgcacggacctgggacttggaggatagcaaagaaggaggccctgggctcccaggggccggcctcctctgcctggtaatgactccagaacaacaactgggaagaaacttgaagtcgacaatctggttaggggaagcgggtgttggattttctcagatgcctttacacgctgatgggactggagggagcccacccttcagcacgagcacactgcatctctcctgtgagttggagacttctttcccaagatgtccttgtcccctgcgttccccactgtggcctagaccgtgggttttgcattgtgtttctagcaccgaggatctgagaacaagcggagggccgggccctgggacccctgctccagcccgaatgacggcatctgtttgccatgtacctggatgcgacgggcccctggggacaggcccttgccccatccatccgcttgaggcatggcaccgccctgcatccctaataccaaatctgactccaaaattgtggggtgtgacatacaagtgactgaacacttcctggggagctacaggggcacttaacccaccacagcacagcctcatcaaaatgcagctggcaacttctcccccaggtgccttccccctgctgccggcctttgctccttcacttccaacatctctcaaaataaaaatccctcttcccgctctgagcgattcagctctgcccgcagcttgtacatgtctctcccctggcaaaacaagagctgggtagtttagccaaacggcaccccctcgagttcactgcagacccttcgttcaccgtgtcacacatagaggggttctgagtaagaacaaaacgttctgctgctcaagccagtctggcaagcactcagcccagcctcgaggtccttctggggagagtgtaagtggacagagtcctggtcagggggcaggagtgtcccaagggctggcccacctgctgtctgtctgctcctcctagcccttggtcagatggcagccagagtccctcaggacctgcagcctcgccccggcagaagtcttttgtccaggaggcaaaaagccagagattctgcaacacgaattcgaagcaaacaaacacaacacaacagaattcctggaaagaagacgactgctaagacacggcaggggggcctggagggagcctccgactctgagctgctccgggatctgccgcgttctcctctgcacattgctgtttctgcccctgatgctggagctcaaggagactccttcctctttctcagcagagctgtagctgactgtggcattactacgcctccccacacgcccagacccctcactccaaaatcctactggctgtagcagagaatacctttgaaccaagattctgttttaatcatcatttacattgttttcttccaaaggccccctcgtataccctccctaacccacaaacctgttaacattgtcttaaggtgaaatggctggaaaatcagtatttaactaataaatttatctgtattcctcttt

SEQ ID NO: 74 - DNA, 72800 bp, Mus musculus
  source 1..72800: mol_type = genomic DNA; note = Mus musculus strain C57BL/6J
agggagttgggagacgtagctcacaacgtctccctcccacccggctcaaacaggctggaatctctgggcctagaggctgatctgtccctgaaagctggcctccaacaagcttggaagagcttccacctagggtgagtcacctccaaatggccctcctgtcaggaggccaggagaaacagccaggggatggaagccacaggagcactgtgcatggtggagaggaacctgggaaagagggaacagaaaggcttccagggcgcccacccaggctttgtgggataggtgctgggggctcttcagcctctgcctagaggaaagagaacagattatttctaggacaacctgctgaggttctctctctctctctctctctctctctctctctctctcttcttccacctcttctgttattctttcttacagttggctggcattttagtttctctatttcctggttcattgcctgattcctgtagttggaaactaatggcaatggttggtcgccaccccacccaaaaaaaccaggggagtggatgcaggctgaccacagaagccaagcagattgaagcaggtgccactgggcctttgctccctccagcaaacccagatcggttcgctggggtcccctatggtcacccgtgtcctctggaggactcaggcaagtcctttccagccaggccacagttcactctggaagcgttgggccaggaagtgtgcagccgatccccaccgggctgtattggttagttgtgaatggttctttcgggatttgcgcctcctttctttgctcaagcagggcaagggtcagccagctgctgtgtgggtttgattttcattgattccagggtcgtgtctagctgggtagagatgggtcctgtaggtgtatggaagcaagcataaagcatgctttccgttcactctatgtgaggagaagcctggggctgtgtggacttttgcagctgagtcaaacctacctctctttccttctcaagacagaggtggtgggtgccaaactttgaatcctattatcctaggaaagagctgaataaggggagtcaagacagcagtggtctctttgagaacaggacttggaataaggaagccggaggccttggaagaactgcaaacaactcaggtccttccaggctggcagcgttgctgtccagacctcctctacttgctcaaaggctgacaacagacatctgggcatttttgatactggtacatcttctggcactgggtaggctttggtgtccaagtgtctagattcccttgtaccggtgcaggacacattgcctctgcaaagtagagattatattcccctgcagtcagtccctctaccccggaagctagcatggacttccagcagtaaactcaaaagctacctggaaatttacccttcccctctaccctgtactgtcagcacaccacttatttcctcctattctcattccccagtactctcaaaaaaattttttttaattaaaaaaaaataaagcgaaaaaggcataaaaaaatacatataccgattaaaggaaaaccttactgtaaggcttgtataacttatggtcacttgtgtccattgtccacattgttggtattgctgtttagtagttgcaaatggttagtttctgctatctttattttgataaatcagtctagggcagatggtatttgaaagctcccctttgtgagcttgtgttttacgggctcattgccacgggtttcgctcttctaggaacatgttctgaacatgttttttgtagttttgtatcgcatttagtgggatcttaaaaacagtgttctgtgattggcacgaaagaaatcctcaagagctggtcccgttgtgtctctcggggccaatcaaatacccatttccaacggctttctaatgcctggttctgtttgcacaggaagggaagtcacggtttgcacccgtgaagtctggggaggttcagagctgggaactgcccagaggaaggggttcggggctacagccatcaatctccagttgtttaaacataacgctaagtggagactcgaggcaattatccgaataatgggggaggggcactttcacctgcattatccggatcgaaagtgcggtgtggtgacaaatccggggctttttaggccctggtggttctcagcggtcttgggaatttgaacggcttttctgtcggttctgcaaaggaaattaagggagatttctagaaaggcttgacaggctatcctgcaagggggtggggggaaggctggggggcgccgcgggactcccggatcttgggtgataaaggcagggggcagatctaagatcaacaaacctagcggcgtcaggcttgggcagagggtaagaaagttcagagatgggcgccggggagaaccacaatccaatcggtcggtcaaaagaaaaagaggtgggggcgtcaagcagggagggagtaggggcgcggccgagagtcttcttgcctgtagaccgagggcccccaagtgtctggcggcgggaggtggggatagaaacaccaccaccagttaagtttctcaggggacagaaagtggcactctttaaaggggtggatgcaatgtgggtaaggaggtggggactctaaataacacgacctcagaaaaagcctctgtactgcccaacgagacagaactgtctccaagtgagagaagttacaaatgaagacagtattattaatgttgtctagttaaatccttgatgtgtgtcgctaggtagctcacaaactcctcttgcgtccttgattggcttgttttcctctctccccgaacgaggaggagaaagatgggagaaatatgcccaaagtctagccaaaaagctgagactagtcgctgagtgactcctctacagattaagtctcctcgaggccccgcgatccgggcagcagcagattgcgcggattgcctgcggagcctgggcttcgcggacctcctcacactgaatctgagttgtggtggccgggcggcccggtggagcaaagtgacaaaggcttgagcagggtccctttctcaaggctgggaatgtccccgcaaacgggttcgctaccactttacgtgcccagctcaccacttagctctgggtagaaaattcgataccagattgctcctttcaaccctggtggcccaagtctctttggggagggggtggagatggcgaatggatgggtcgtggctgaagaataatagctagtccgcttccttgctcgcagggttgatgggctcggacgcttggtctacgggcaagaaagtttcagccgagaccactcttgtgacctacctgggccatcgtgctttgcgcctgaaactccttggcagaacaaagcccatgagtcggatgacctgggaccgtaagaagagcggtctgccttctctgccttctcttctacctgctgccctctcttgcacctctccaggtgtcctaagtggtacccaagaactcctctccagggcagtttccttttcccgcttggggtttaataataaagacactgaggcttctgtatagtataatgctgttggcctgtttgccggggcagtccctccgctagctcaccagactcaacccgacttcctccgccaccgtggctctccacgtggctctctgctctacttctctgccctgctcccgaactcgtaggaaacttggtacccatttcttcctactttgcgtccgccctaaaaaaattcccagccagagttgctcggtggtagcccgcttccacagaaaggaaggagagaagcgtaggtttaggggtgatttaggtcagtgtagtagctttccaagctttccctcaaatgtgcccccaacttctcaatacccctatggaaaaacattcagtggaagggacttagccaccccagatccatgacgctatacacataatcattcaggtctttctatggccgagattagtgcaatattgagagagtcacgattaacaccttaatactaggtaaggtaaggagccggttgatgagtggccagagaaactgggactaaggaaaatttcttccttcatctgcgttcttggttccggcctcctgcaaatcagaaatgtctttgaagatgtatatttcttgaacttcggggagtctggcttgtctagaagagcggagtgacttggcatccgcgtgccgacattcagggaaggacactgtccctccattcgcaacccgattcttaacaaaactccgatcttggtaaaatttcgatcttaataaaatttctggcagagtctcacagtgccgagcatagtgaaaaactagagtggtggctgcaaacacacacacacacacacacacacacacacacacacacacacacacacacacagagttacccctaagcagctacatcactgaagtacagtgaaggcttgagtggacgccggcgctggtccctggacccaatgctgttgtttcattggataccgggaaagggtgcttctgccctctgcgcatcctccaccccccccaccccacccccgtcagtcagtcttaggagcgtctttattcattctgtacaatctacttagcctggttttctcctttctctccccatctctccttcttcctctccctcctcttctctctctttctctctctcctactcaccacccgtccctcctttcttccccatcccctcttctaactcagctcaagaattttcctcctctggtttaatcgaaattgtctccttcatttgattccctttcctccagttttgctccttaactcgtttactgcctgccagttaccttcaaatacacattgcctgcctttacatctccctccggaaccgaccgggtcattccccttcctctgggacatcatccccgctctttacgataaatttgtcttgttcattttcatgtgttactccccttgcattggatgaatcaaaagctttcttatggttaattatcatctccatttcaatttctaaatatcaaactacatcgtagctaattcgttttctcttaaggagtttctgaggcttctcctcctgcccaaataactagaacactataataactttccgatggctcctcagtagtgttttttttttttttcaaaattgggtagtaatgtgtaaaaaaacgaggccagatgctttatcctgccaaggtatttattatggcttcccactaactccagagatttacaggaaaatgataggatgcaagtggataataacgacccttgttcaccagctaagattgtatttgctttctgttagagctctgtagctctatcataataatgatagaacaattagctgttccttgtagatacataatgattttgagtgcttcttatttgctttatgtgggatttgttgttagatcacacatgagcatttttatagaatagtcttgatagtagatgagttgtgctctcagaaagtgactggaggcagaaacattagcctctaagctgagaaacggaaaacattttctcttaagaatcaatcaaacaacaacaaaaaatcattaactcttaagagaaatctataacaaatttttatataaccaagatcattagccaagctcggcgcctccctcctttaatcccagccctgaggaggctgaggccacaggggcaccaggatttgaggccagccagtctgggttacagattaaagaccaccccaactccaaaacaaacaaaaaccagaaagaaaggaaggtagaaaggctgctggcgggttgaaatttgacgtagggaaatcagaaggggagccaagcatgaactcagaacactgtactctgctctctcatgatctgaaacagcaaaacggaaggaagttgaacccgactctggaattcttaaacactgttcaggcaaaacatgaagggttattggagggggcgatgtctcaaagtgtttctagacccttaacattgacaagcagaattgaagagttcttgtatttagacttactcctgaagtcccacagacagcaccaacccaccagaccaggaactactgggggccgggtggggagtgggagagacttggggtttaggggctgttctgggagcccaagtgaatgggccttggtgttctgcactctcttagcaatctctttgggtttttttgtttgtttgtttgtttgtttgtttttgtttttttttttttggtttttttttttttttttgtgccttcctggttcccttgtgttcgaccaccaccactcccgtcaccactactgcagggggtttacctctactgttgataaaggaagggctgctatctaatctggtccgcaccaagaacaatccattagccctcagtatttagcatttatccggggtgggggaggaggaaaagattatgctgcctcatcctactgcagcctgagttgtgcctctgaggagagaggaacgaatgaaactcaaaaactcaccaggaaatctgtgtcccctcgggctgataaattatattttcacccgttgctatacccctttgagttggaggggtggtttttcttttaaagaggtgtatatgctcttactttaggtgtgaaagattccatttttcacccaatgtcccttagggcggcagagatgggaatccgtccagtcattcattctttcgttcattcattcattcagcaaacatttgcaaagcttcactccacgccaagccttgtgccttgtactgacaggttaaattatttgcccaagatgagggttatgctgacaactggggcgggaccctaaatcaactattgtagtcctatgactgaccgcttctcttcccccaaggcacacaaatcggagccacggggagtgggaagggctccagaggttatcaggtccagccttccattcaattcaagaatcccctccccagaatgctagtgagcaggccgctgactctgccctccaccagctacgagagcagcttcctggggttccccttccagaaagtggtgtagcagtccaaggtcctcagctgcgccataatctaggcttgctcttgcctaagttcagagagccaaccctcgtctactgctgtggttctgtgtgcctggctcctccaagagccagaggttactaattctcccacgtaagcatccttgcttctcctctccagtcctggaagtggggattccagaattgatggcacttcccccccttgaaacctgaaagtgggaagggccttggccaagctgcttttccttagttgcccacaggggatgcatgttgcctggtcagagaaagccccaggcagtagccaaacaatgtccagaggctggattctagatccaatatagctcagtgacaggctaggtgacctcagagaggttatttttgtagcatattctagaaataagatgcatgcatgtgctcagtagctgagcttgccaccttttgcaaagataaaattgatctctagaagtagtctgagattacaaaaaaaaaaaaaaaaaaacccaatgtatagacaacaaagaacattctggaagcttttctaccactttactgactggttatcttaggcaaattacctttaaaaaaaaaaaaaagactgtgtttcagtttcctgtgttttaaagtcctcctaaaccggtctgcagacaagcctctgggtccccaaaatagtcaatagttaacacggtgacatggtaaaaagccttcagctagacattaatagcctcgttgatttttttctttctctctgtttttttcctctctaaacttatgacttacaaattcttcagatatcaaatatgttcaataagaagcagacaatatcctaagtccacgagcattatctttaactgtcttatccaaaattgggaattgagccctgtcagaggcagaccaggagctgtggctgtggtcttttgggtcagtctccatgcaaatccctgtgactctttgcttcgctgtttccacagaaagaaatgtacccaaaggaattgctgaggctcctataagaaaatgcatctataaccaaatctgaggacttgacaattacacttcagaagtgtggttagtgtaacaaaaattggtagcaacctagtaaacagctaggatttactattgttatgctttcttgacatatttaatgagatagcaaagtctcaaagtagccttttattttttatgtttttaaggtttttctgattgtttgctagccgtgatattccgagcctcctttgtgctaacaatgtgcttagcactgagtccaacttttaaattaacaaggattgagagccactctttaggaaataaaactcccctgagaagacaaaataaagcggttatgttcttcatggttcttttcataggtgtagttaagcgtccgggtttttttgttgttatccattctgtcttttcaaatgagctataaagtgaatgtgtttctttcaaattaaaaacaaacaagcaaacaattttttgaaagaaatggggagggctgatcagatcttgagtgggtctgcctccccaagatctttatggctgttttcaaggtaaaggctgtataggctcctaactcaatatgtatggtcagactgtacaacagctgcggggatacttcctgcctggggaggttgctgcctgaagccacgatttctatagagtgcctcccttcctcctgtggggagcttcaccaccctccaggcagtctaaaatctctactgcagccttgaatttctgaaactgaaagctctctgttctgcaacgcttcctccccactcacactcccttcgctggcagaaaggtttgggatttctgagccaggtgctgggctagctgggaagacaagttgattattccagcctgagaagaggaggagggtgcattgggggttaaaggaagtcagactttcagccatggccaagaggccagggatgttcagaaagaaagaccttggtaagaaacccagagaattctagccagaccttcagagaacaaaagcacttcaggataaactaagtgccaggtgcctttcttttctgacactggaaacatctcttagcaatttccagaggtcctctcactctgcaggcaaaatgtaggagggaagggggagatgctaacagaaagaatgagcagtgggcaatgcaaactgtacacaaacaaactgcaaagcagatctagcagcgctaaggagagcttccaatgagcttgctctgttacttgtgtcaaagcaacacttgcaaacgatgatacaagcagcaggtgctagccctttcctggttccttatttaacacattgcaacacacttgctgccctgaaataccacccggatcatctttctccaagtcctaaaggattttttttttttaattcaggatcagccttgattatcccagtgggtagatggttcctgcaaactgcaggattttaggtttctgtagtgtgatatcaaactccttctgtgttcacctcttccagtctctgctgaggtaagcaggacccagccaggcaccttagtcaccttcaagcttcctctctccacagcactggcgtggtggcaggtgctgtcttggagaaagagtctcacagggggtaggtccccatgctcttgttgacaacctgattctctcctgtatttatgaaaagaaccaaacccacagcaaggagctggccattgatataaccctgttatggcaaagctgcaacacaggcaaaggaaaccaagaagcaaaaagagcagggctgggttgtttctccctagcacttgaggaaagacaaaaccaaacctcattcctatagatgagagttgctgggtcagtgagttgtgtgaccctggctgcttttctcactcaggtatcatttggcatttccagaagtgtctcttcacatagctttttaatcaaccaaccataggcctcagagaaacttccttaggcgctcagttttgatttatgtgatataaaaataattttcacttgtaatccaaagggagcagaagacatcaaacagccctgctcctggttctgcttcaagtgctaggtaccagcccctcatctctgtattgagaacggactgaccggccttctggtgtatccaagcgctttcaggaatgtgttatatttgcccctcccaggagccctctggactaatcagttgtgagtattgctgtgatggtcgaggaaactgagttgtcctgccgaaggtcacatcactaataagtaacagaattaaactctaatgcctgctttaactaccccaagctgcctccccaccctcccgatgcccgagatcagatggcccttatcaacggctctgtaattgctctaataggggttatcaggatccctcattttgcctatcccaaaatcatggagttaaagaacagctctggattcttagggttcgtggagccccgccccgccccgcccctttcacaggtgtggcccagaggggttaacgtgaactgccaaaggtcagtcatgtataagtggagaatgaccaatgtcatttttaaaaattagttaaaagaactgcctaccaagcccatttttatggcttattttaagcaggttaatgagtataccaggcacagctttaactcccaactgagtaaatgctgacactagtttatagattgagcagataagtggcaataaggaattattcatcgctcatttatcatccagcctactgcaagtacaaggtataaagtgaagcaaataacaactttagagcccacacgtgtggagcagtcagagcagcaaagactccatgctctacaaagcttgtgcatgtgtctgagccccacgtcttctgagatgagaaaaaggaaaatattcagggaacatatgtgcatttcacaaacaggctgtgaacgttagacttttggagcgcacgtgccatgccacacatgtggagaggttggagtcaccttgaaggagtcagctcttgctttccactatgccggttctgggtatgcaactcagactaggaaatgcttttactaactcaactatctagccatcccaggcatatagagctcctatttggtcttcagtgaattcagtcactaatttgttcttctgagtgatattaagcacctactgctcccagagtacggtggggaattacattattaaacaccaactctttctgctacttttctagtttaatgaggtagaaagcatacacacacacacacacacacacacacacacctaaaaatctcaatcccatgagtctttgggatgacagcgtatatcatgggcagggtcagctggagtcagaagaaagtgtgcctgggaaggaatgggaagaaacagaaggctatctatcaagtctaggagagatacaaccttgttacaagtcctctgtccccaacagtgtgtatgagagggctgagtgacatcatagctagaaaagacactatgaattgatagcctcagccaagaccctaaccccaaaggccatgaaacaccagcagcctggtagatagctgatagaatctgtccattcattattatcacatttggggcatatgttgaaaaacgaataaatcaacagacaatgtgcttgtttggggaggcaggggtaagtgctaatgaatttgcatgtgctattcagaaagctagctagctttttttttaatttattaatattttatcagtccccgttcatcaatggtagacctcaggcacaaagttcaacatcaatagcagagcaacccacaaatctagtaagcaacttgctcccggcagccctaagaccctaccttgaggcaccaccacgtggttcactgtccagtgtctggcccgtgtcttcaggcacatgaccactgactctactggaaagagaactgggaagatatttactcaaaactccagactcattcggctcagcaaattcaagcaacgtatgcagagcgtgagaataggagtgtgtgctggtggtgctacacaggacagcaggtatccattggccctgtctcgggtaacacagtccattgtgttgcctatgggtcaataacagaagcagaagaaatgtccagatgcctgggtactagtgacctcccaggacccttcttattcattgtgagcactggaatatatacaaatccacaggactgttaggaaggtaacctggaaatacaatactggaccaattttggaatggtttgtccttggtccaagatggccataggatgtccatgtgcctttaccaaatcatcaagtctccacctgcctacacccatgcctagctgggcagatcactaacccagctctctataaggggtgaaagctaaaccaggttccctggcctgcagacccccatctcagaggctgattgctagccctcctcccctggagatcacattaaagtgaagaatatttacccttgagatgcagcagtgaaaagcaggttgatgacccctggaaacccctagtcttggccagctacagtactaggtatgacactcaaaactcagtgactcacgaaagcctgtaaccctttgggtgctaattacatcatttgtattgccccagcaatgacaaaaaggctggcccagaactgatatgtgggccaaaggtacctgaggtcatggtcaccactaacagggactctgcttatggtattgatgaagcatcacatggcattgtccctaattgagcctctctgagctggcatacagtggaaaagaccattaggcagatgtctctgctatacccctgacagtgtgtaaaaggaagatttacatagtatagggatgggttgaaacttccaattttctgaattaatcaattcagggttgcttggatccaagggaggttggcttcaaattcactataatagctgagggtgaccttgaactcctgatcttcctgcttcgatctcctaaatgtaggatcacagaccttcatccccacatacagtttgtgtggtgctgagaataaaaatcagggcttcatgcacactaggtaaacagccccaatttttaaattttaatttgatatttttgaggatttatttatttttattgcatgtgtgtaagtgttttgtttgcatgtatgtatgtgtaccatgtacatacctggtgccctgagaggtcagaagaggatgtgaaagtccctgagatttgagtgacagatggtagtgagccaccatgtaggtttgggaaatgtaacctgggtcttcagcaaaagcagccagtggtcttaactactgagtcatctctccagcctcttaatttaaatataaaaacatgaacaagaactattatatatgccatatctccagccccttaattaaatataaaaacatgaacaagaactattatatgttagaaactatgggattatttttcttacaaggaaactgacatttaggggagaagtgttcacatgcagttagttaggtgtggagaaaataaagaaataaagtatgctaaaggccgtggaagcagagacagaacagaaattgactctggaacagggatggtaattttaaaagggggatgaacaataagatcatgcttgcctgcttcccctttgtgtccctcacaatactgacacattgctcagaggaacagtgtctagacaccaggatccaagcacttgagtttcgatctttatcttgcatatgctcatactaggctagacaaggtactagatagcttctgctgtccctttctttgcctgtagaatgccaaagcaggctgtgcagagtgagctgtgtttgtctggcaacatgcagagaatatagcatacccatagtactcaatgaatgtttacccagggaatggttaaaagttcccatatgcagtccaagcttttcattgccactcaaatgggtctccaatgcacatttttgtcctttatttttattttatgtatatggatactttacctgcatgtatatatacacaacatatatgcaatgtcttgtaagagatccaaaagaggatgttggatcccctgggactggagttggttgtaggatttcttgtggatgctgggaattgaacccagctcctctggaagagtagccagtgctcttaaccaccaaggtatcttttcagccccctttcctttgtgtttgagacaagatctttctatgtagccctgactgtcctgaaactcacagaaatccccatgtctcagcctactgaatcccaggattaaaggcatgtactctgggcagtacttcccattttgagttctttgtagaagacatttattatctatggttaagactgactgagcccgccgggcctttaatctcagcactcggcagaggcagaggcactcgggagacagaggctggcggatttctgagttctgaggccagcctggtctacaaagtgagttccaggacagccagggctacacagattaaccctgtctcaaaaagcaaaaaaaacaaaaaacaaaaaacaaaaaacaaaaacaaaaaaaaagactgactgagcgccccaatggctgggggttcccactatgtgtgaggccaagatcatgtccctcctatagtcacttgactgcttgacaggatggtaaaacttggcaacatcagtttatagagctcaaagacacacacaaaatgttgctttgtaaagggatgctcaaaatgactttctatgactttcacactcatctggtgacctgaagcagacccaggaatctggactctcagactgccagttgtctcagccctactgtccttcagctaggctgaactcttccagagctctgggccacagcagttgagttatgaggaaggagttcttcctccctctttttcactggtcccagagaaaagcctattttctagttcttgcgtggcatggaaagttcccacaactgtctgggaattcaatgtcagggctactggagtggggcataagcctctaaatccctaccaccaccaccaccaccaccacacacacaaggtggggaggttccagcgctgagtttctccattagtttgcctcaagtgaaggtgctctggagtctcccattagtgtgcctcccccaccccgccccgttcccacagagaaggtacacctagggtggggtttggagactttccatagaaaacgctgcataagcagggcagtggtggtgcacgcctttaatcccagcacttgggaggcagcagaagcaggcggatttttctcgagaccagccttgtctacagagtgagttccaggaaactgaaaaaagaagaagaaaaaaacagaaaaagaaaacgctgcacaggtgaggctcgcaggagctggggcaactgtttctcccgtgggttggtcctcagatagcaaacagtcaggcagctttcttattcatctaaaaggccaagagaagaaaacactgggtctagccaagatggaggaaggcgcagcctgaggagattggaggttgggactgaggtgaggcccagtgcaccttttccatcttagtaacccaagtgagttaaggaacgcttgctctactggaaaccgagccggtaccaaagggaccttactgtcctcatctgcggaccggcttgtctttagttaccggccggcctatcttatctgtcatctgtgactgtatacacacgcaagaactgggctaaaatagtccaagagctgagcactccacgccgcggagtcagccttggccgggggtggcgctgcggagcggtaagagcggaggccagggcgcacggggccgggaaggaagcgcggccggcgagcggggcgccaggctcggccttctgcgcccccgagccgggccgggacgcgccagtagggcgctggcggcggccgggggctgacctcgagcgccggcgagtctgcgccctcccaccggcccgcgctcgcctcccgccgcctcgggttaggcggcggcggtcagtgcgcacctcatcaataagacctgacaggccgccggctccgcggccatccatcaagccgggtggcgagggcggcgagggcggcgggcacgcggggtgggagccgcagcctcccggaggctcgcgatgctcgcaccgctgggtggcgggcagcgctctgctctccagcagagtacgacacctcactcggctccccaggacttaaagatagatcagattacttagaaatggtcggtacaacccacacattgtgtgggtagggaaacaggccagactgggtgttggcacgcctggggcctcaaaactaactgtttggagaataagacttgagctgaaccgggcggtggtggcgcacgcctttaatcctagcacttgggaggcagaggcaggcggatttctgagttcgaggccagcctggtctacagagtgagttccaggacagccaaggctacagagaaaccctgtctcgaaaaacaaaacaaaaaacaaacaaacaaaaaaaaaacctacgcgccatccacgccggcacccggtacagtcaagagccacgtaggactagtggggcgggataagtcgaacctgtcaaacacattaagaataataggctccaggaacttgaggtgtaacttagctggtaaagagcttgcttggtgtgccagaagcattaggttctatccgcagcacccaggacactagtcatgatggcctgtgatccctccacttgggcagtagaggcaggaggatcagaatttcaaagccattctccattctcagctacatagttctaagctagcttgggctacatgagactcaatttcaagggggaataggaggctccttgaattgatttagcatttccagtttcactctccttttctaccaggaagggagcatgctagcccctcatagtttatctgttccttatgctgtttacagaactcatttctttactgaacaggccaatcagagaaacttaagtttggtttcacaccaacaaagttttcatcgcacctagcagacacttagcagttttcataagggaattgttatgaagcatatttgctggggggggggtggcatgggggtaggcggggacaatgacactctgactcaaagtctgtaaaaaccttgtaattcaacctcactccacctgattttttgggggggtgtggtgggggtagacggtttgagaccgggtttctctgtgtagccctggctgtcctggaactcactttgtagaccaggccggccttgaactcggaaatccacctgcctctacctcccaagtgctgggattaaaggcgtgagccaccactgcctggcttacagacctgattttttttttttttaaactcaggcctttctaaggcaggtggaagctgttttggcctggcagagatcccttcctttttctttccccaaagtgtgtctggaccaaggtgttccagctgcagaccccagcatctcactacttggttcttcctttcccacctcactcattattttcctactgtttcattagcaagcccccatacccaccctgcaaccacctcctcccacccccagtttggacaaagtaccccagcccagaaactgaccaagctagactgctttatttctaacaggaaataggatgttttgtgaagcttggaattgtcttgggtacaatttctcataaacatcacctgagtgtaatgacagtgtcagggcattggagcacaaggagaactttggtcttaggatatcatcttgggctcgaaaggctgaatttccagtggttttccttagcccactcagcacagctagcataaaacctgttattcccccaagctttgaacttggcttacacagaacttgactgcaccaaaaaaaaaaaaaaaaaaaaaaaacaccagtcttgctgactgtccaggcttcccagccccagtgtccttctcccaggtagcctagcagttgctgcctgaagacttcaaactaaggaagaccaaaagttacaggcttctcgggaggctagggtaggatcacatttgctcctttgtcaacctctatacagtttcctgtgaagtgtgtgtgatgttggcagcacactcaggatggagctctgtgaagccaggttgagcaatggctgagggacaaggctggagtctgcatctcttaaatagaagcccagagcttcctgggtatctaaatcaccctcctgagtgggagtcaaacatgtgtcggggtggtggaagctccctgcagtcttgagaaccaggcagagaagagggtgaggggactgaagaattttatcttgcctcaccaacatctttttttactgttagatttattgacatgtactttccaaattgtaaacctactccttttagtgtacagtcctacatctgttggcaaacaccaacacaatcaagatgtcaattgaataatcctaacactgctcctaaattcctgcacttgctcccacaccctcaaataactctgcctcatcctgtggtcctggcttcctctgatttgacttcagcactatggttgtgtctttttcaaaatgccatgtatagatggttcttaaacatggtcttttgaatctgaatcttcttccatggcactgatcacgttacatattattcattttcttgggtgttgttgaaattcattcatttttgttgctggccattattccatagtgtggttggacagtttatccgtctcccacttgagcttcctagtttagaataattatgaaagaacctatagggtttgtttgttttgttctgtttttaagatacctgtgatgccttttagtacatgagacaaaacatggagaacctaggcatgtggctcagcccgtattagagtactgccctagcatgtgtgaaaaccctgggttcaaacccagatcagaataaaactggatgtggtggtggtaattctaggactctaaaggtggaggcaggagtatctgaaattcaaagtcatccttcatcctcagctgcatggtaaatgtgaggcccccttgggccactctgatcttgtttaattttttttaattaaaattgccaggcctttagtgccaacactcttggaaggcagaggcaggcggatttgagttcgaagcaagccaaggcctacagaatgagttccagggtagccaaggctacacagagaaaccctgtctcgaaaacgaaacacaaataaataaataaataaataaataaataagcaaagctactccatcttacattgcaaatgtgagacctgttggacgaccttcaaaagaaagagcaagaaagacaccggccctaacaaagtagctggtggagtaagggcaggggacgctacttttttgaggaatcgatcgctcttgattgattggtggcataagttaccagttctgcgatcctccgccccactcactggaaagtagcgtggacatcaggaaataggcatctctggagacttcctggtggacgggttctgcccctctccccaaggaacagcactactctctgtgttgctggaagtggaaggagaagctgcttggttgaagcggggcacctttctacgggtacccatcaatccacttcattcgggggtttctttactcttccgttgttctcccttcaaatcctggggtcttagcaattcgttattcactagcatctctggggaagaactcagggtttaaagagagtgcaccctgtccctggtgtaaccaagtatgaggcttgtctgtcagagttgactcagttctgaaaactattatgtgtgctgtgatggcaacaggagtcctagtcgccaaggctccatgctccccttctgccttctgtggaaggaggtgcttgaaccaagggaggggaagaaacagccactccaaaggcacctgctacagtggtgggaattggataagcgtaggctttggtgctagtccttgactggaaggcagggccagacagggtggttagtcacttcgggaacagtgttacctccagcctccttcgctgccgcccaccctctcacccccatctccctccccaagctctagttcagacgctgtttttgcacttggtcttcgagcttccttgacattttcctgtctctctgggcacgccaagtcgcggcgcctacttgggcgtctctggctcggggtcacctctggctccgcgcgggtgaggtgaagggtgctagggtcgcaggctttctttccggccacctcggtgtgaggcagtaggcctcctatgcggaagcagggccaagctgacgcttagaacagtaggtctctggggtctctccgggtcgtccctgatgtgtgcgtgttcggagtccttcaggggaaagcgctggtgtctagttgtagagtcggaagagggaagcccagcagttctgtaaagccctgtgactgacggggacggtggtggggatccaaaagaggcaacccaccaagggctgctgctgggtagctctgacatctcagaaggctcaggccggtatagttctgttcgggaatggtctcctcctttggcacctagccctaatccttctgaccagttttgtgtgtctgaagcctccactctcaagccgacccccgcccccatctgccatttgacattctacctatttgatgtgttttcatctgtcttcattttatggaaagaagctggctagggcagcgccaagttttcacccttggaagttctgagcacctttctgccttcccccactcctggtctctatttctgtctctgttcctttctctcttcttgttttgctgtggttgttgttgttgttgtttgttgttgttgtttgagacagggtttctctgtatagtcctggctgtcctggaactcactctgtagaccaggctggcttcgaactcagaaatccgcctgcctctgcttcccaagtgctctctctctttcttcttgtgttcatgctctccactttccaattttctccggtcctgatgtctgacagtctcctgtcctcccaggatttaatagatctggaccctttgagaaatcagaatcatgccgcagtatcccttggtgggctgcctctctaagatccccaccacattccctgccattcacagcctcattggtactgagctagcttcgccagttaaacttgacttccagcatctggtctgcatccagacatccattcttcttgctcatctcgaacttttagcgttacctgagatatagcctagatgttgatgggcaatttgtagacagggatatgcacaagctggactggattagcactctgcagatctgtccctggccccagtgccttcctctgcgactagatggaaagattctcatagaccaaaactttttttaaaaaaagagctttgcgctctcccagcaacaccagaaattattattcctctattaacattcctcttgcctagtaatatgtgattttaaggaaggaaaaggcagagccaggggcatgtacagctctgtgagtttaagatcagcctggtctatatataacaggactctgcctcaaacaaaacaaataagcaaatctttcttgcaaattcaaccattcagcaaacactccttgaacacctactgtgcattagcctcagttttcacctcctcgagctttctggagggtgtggtgatgtgaaaattaatgccagcaaccacagacaaatgaatttctaacctcagggacaaaagacctaaggataaatcaaatggatgtttaatagggaattaattaatggcactctatctctgggcaactttaaaagaataaatgaggaaggagccccccccgcccccgcctgtgaacgaattgaatccagtgccagtccaccaggaatgatggcagaggtggctcattagatctgtaagagaccagcccctacagaaaatagtctcagagcagatgatcgagttcgtgtgggacctcacctccagaagagggcaactccctctctctgtagcttcctttacccgctttctggacgggcgcccttctctacagaagagtaagggagtcctttgggaagcaggaagcagagtgtctgtggagaaaggggtgccaatatcaggactgggctcctgggccacatggtgaccttgtcgagactggtactccggactgaagaccgtccctattcacaaagcctctgccatcattcataaacttagcaaaaaaaaaaaaaaaaatcttttttttacaaaaagctttttgaattttcttagattgtgaggcaccgttttgttctaaattgaaattgaatttttaaataaaagaaacaacatttagaggctaaaaaaaattaaaacgactgtaacagagaatattttacagctactattaggatattaagaaataaggtgagaatttggattggagacccgctgcctccacccacactttaccacgtagactctgagtcccaacctttctgtgtcattttaaagatgaagataatagctttgtcttcctcattcttcctttgcaatgtgtccccaaagaaaaattgtggggagcttttcaggcctcttctaggaatttgacagaaatttgaaggcaagttttatcaaaaaaaaaaaggtaaagtaggagagtgacctgtagtttagaagtgactatgaaatatgccaccaactggtctccagaccggtaacactgggaagcattttctcagatctatgaggaaggcaccccttcattttgcaacattgcacaattctttttttttttttttgtaacattgaacaattctttaaaagctaaactattaaagagggctattttcttttatggtgaaacctcaagatttgactctaggtgtggggctagttctgggatgtgtgggcacagagaattcacaaccatccctcttctgcctggaaccccaagagctgaaggtccagggctgggggaagaatgggtacatagacttggccttgcaggttctttgttttttgtttttgttttcttttttcttaaacaagatgtggtgtgtccagttgctctcttggaattttctgctttgagcagggtagtctcgagattcgggctgacagtcacagaggaaagggacgtggtgtctgtggtgtcaggctccgttgttaggacaggagaccgaattcgttcagtgcgggtcactttgtgcatctagcccaagtcctttgtagatccagaggcacggctgcacctgaggtatctgttctataagaccaagctggatttctgtatcttacctctggctcccttaccaaacactggaaactgcccaagctccaagctctagtttctttccggaactcgtttcttctctcactgtgcggcttgtgagttgattcccgttgaattcggaggggcatctgcctccagaaatgcggacattgtgacgaccaacattgaccaccgtttaaaccaaatcacagaggtcccagagggcacttgctggtgcccaattcctggggggggatctctcttggtctctgtgtgaaatccaacatctgctgtttgttttgtgtgtgtcgtcgtcaccctcccttcgaggaaattcaagtctcaattcctacgtacatcgtgttcatcctacagtttcgtttctgctagctaagaggccagcttaagtctcagaatccttcgtgaaacaagaaataaaatgtattcttttgtgctgcaaagattatttaggaatacggctcacctaaatcagtcttattacggaaagctacagacttaaggctggatcattagactctccaccttcactctgagcaaaaagatctaagaaggttgaaggtgagcctgccgcctctgcccagagaccatgggaaaggaaagtagaaaggggaacgtgagccgggttgagccacccccaccccatcctagtgacatagtccttaaaaatagccaagtctgatcctcagcgttgcccagcccccctcctctctttggcctccctagtctgagaggagccgataacccccctccatctccagccagcaaggccttgaaatgctccccgctcctggcaacgcacagaggtcgcctagttctggttccagcagaggaagggagcaactgaaggaccggaggcaaggggaggaaggagggagggaatgaagaaaaaaccaaaagcgcccaagaaacgcgtctggtttgactctcagcccacacaccgggaaaaatttgttgtgtgggacccaaagtgtgggggttaagtcacaggaagctgaaacaaatgtctctgtcccaggcgccttcagagtcagagatctgtctcgggcctcccgctcgcagcagtcagctcagcgggagatgcctggagactcctggaaaggaaaagcggtctgggatggtctttggctgatcttagcaagagcgaaggatcacccgattccctaagagacttcactgagtctctcaatcgcactgagcaaagtatccccagactatctggggtaccctcctttaaaccgttagaacttggttttcaggaaggctgttgggtgggtagaggtggggatggctaagacacaaggagaatgtcgcctggcagctgttggagaccttggcgacacagaggcgtatcacacatggctgttcccccagacacttaagccccgagcttcagacttcatgggtaacaaaaccaggaacgctaggtttggccccggagcttagcgcattttggtctatgagggacactacagtgaggcaaatctgagatctaaggcacacaagtcagagaaagagagaggggggggggagggggaggaggaagggagggagagagagggagagggagggatagagggagagaaagggggagaggagagagagagacagagagacagacacgcctcgttggcttgggctgtgggcctttggcttcgtttctcttctgctcaccaggtagttgagggtttcttgtaaaataaagcaagggccacgccattctctgcattcatccgagagtctcagaggagatgttgtgggagggttccttgatgctcagcgatggcctctgaaatcctcagaataccatccctaaaactttaccagatctcgaacctgcaggccctgattctgactggcattgtttaggattgggggggggggctggagaagggaccctaatcatggggccccagcttccggggcgcccaagggctcaaactggcggcacccggggctacttcggtaaatcaagccagagtgcgggcagctcagcacccctgacgggcctcagttttctctcctctagagccgctctggacctcgggccccttcggtttggaaaagagaattcccccggcgcagccgtgctcagtccttcctctgggattttcctgagatccccacgggttggccaaagtcccacgggttttccctttcaattggctcggcgtcccagcctgttcctagcgcctgggttgcttttgcactggcggggcaatagcaatagcaatctgcagtcagtcctcgaactgcgggagccggtgccatcccgagccttctcgggctgcacagggttcttaccaggtggtattccagccctctcctgacccctctaatcttgtattggaaaccggtgccggggagagaaatgagggcttaaaagaagaaaaaaaaaagtttagcccaaagcgcgagagccaccagagagctgttatctgcagctgaaggctgtggtaatcgatgggttatttttacgcggtaatagggccctgtgattgctctattaacctttagacctgtctgagggactctcccctcacagctccactgcgccagggcctacaggcactgacgccgactccaaactaaggtctggcaccctccctacccccaccctagggaaggaactacagtccttgaatgggctctaaggttagagaccaggctccccacccccacttcatccttttgattggaccccagtcggtgagggctacagggagtgatgagaagggacgggagaccgcaggagtgggaagaagtgtcggcggcgaggggtgcgcgttttgtataaatacataaactcctgggctggtggaggttctcggcgccttgcagtctccaccggctcgtgggaaggagaaaagagcgcttgcgtctctaggcactgaccttaagggccagttcaggttttagtgcctcctgaccctctcccgagctcacttcaagggccccgtagatctgaggctagcaaggcatcccgggtgacccagtgccccaccggcgaccatgagcccagtgtgcgaggtcaccttctcctctaccagccccgccccttgaacagggcgctggacgtggaccactgagagtagggaggaaagagaaggagaataaacacgatccttggcagagcagcaaaccgcaaggacgtcgggctgcactgagggcagaacggagcgcccggcactgagtgctttccttccccgagagttccgcgcgcatggactttgcctgttgggggagctttgggaagagtcctgcgggcgggcgccgggcggaggtgctgccgggtccgggctcccccgcccccgcccttgcacgtgactcccttaggccagtcagcgcaggcgatcgctacgcgggggcccggggaaccgcgccgggagcaggggacaagccggaggcccgcagagtggccgcccgaggctcagccgcagttgcagctccgcggactcacggagatcgcgccggttttctgggaaactggagctggccaggtagggttccccgagtccctgctcttttccggggcaggagaaactcacaagtccgccgccctagtttgcctggaatagggaggtaggtagctgggaaaggagacgccggtcactccagtgcccccagattggctaaaaactgctccgcttttgactttggcctagcgaggactattaaatcaagtgagactgattagcagcaaaaactgatgggtgctggagaggtgcgtttggattgtttgggagggaacatgaatccttttaatccgtcctgtttgcagattctccaactctgccttccatcccactggccagggcccgtgtaatctctctgaccgactgaccctggacaggccgcatagcccacactttggggtgcagataggatagtgtctccagcctgccacgcagggagtgcagagtggcagtggcaggcagccctgggacctgggggagggctggaggcccttggagataggctcggaaacttgcggatctcttctgctttctgtccaacctcctcaaactcctctagggctcaggaattgtgtgtgttatgcactgctgaatactacccacatacaccgctttcggggagaaagcgacccagggccaaaaccccggcggaaatcagggatagtcttgggtagtcggctcaagctcccctgattcacgtattctatcgcttggatgtgacccgggagagttggcagttgttactcttggggaagagatgtctgggtgatgaactttcaccaggtggaaggaaagaggggcttttcggttgaaaggaagaggatagtgagggacccgaggcagtaaaggatccggggaaataaggccgcgctgctgggaagcacctcgggaatttatttcctgtacctttggaaaaggaaggcagccaggaaggacgcttcggacattagaagaaagaaaggttacctggggagattacggagggttagtgtataagttggttagtgaccattctcagtgtggcggggaccggagagacccgcgggagcctaaaggaaagacctgtaaaaagacacattccagcgcggtgtattttctgactctcaaaaacaggttccagaaaagctgtggactaaatcctgaaaagagaaataattttctttctgttggggaacttgggatgaacgttgtagggtgatttgaaagagagagaaaagtctaggccaggccggactagacttaagtgaaaagatggaggttactgggccccagatcatagataggcaagaatccacccaggagaatggtttctggcctttccagaaaagagggatatcttctccaccttctattgttctagaaattcaacatcaggttaaagcatcactcatttgaaacttcagagagcttctgcccacaagcctgcgatcccaaacggatttagtgcttgcagtttttcaggcttgcacattaacaccacacgtatactgtaagttagattacagaattctaaatctcttcttttaactgctgttagtcaagaaaagaaaacgtgtattaccttaaaaaaataacttcctgagttgacattatagaaagtgtaattaattaggacaactacttgacttaaaaattgaatggtggattttttttttaatcaatgtaaatctgcatagttgcttatcggagtccagagatttccagaaagtttaaaactttatgcctttctttttaaagggaaaagttggtgatcttaggtcaagtttcttgtatccatcctccagccaaatttgctaggaggaaatgtccaaccactaagccgacagtttattgtattgctagaaggaaatattcaaccaccaagctggtagtttattgcacattttgaagaagtaaatataaaacaatttatcagtcaccgtgtgaccgcacactttgtcatgatttccttgttgctagagatgatgcaaagatgggggaaacattagtgcatatactaaatgcccaattccagaattttacagtaataaagatgatgatttatcgtaagtataaattacatcccaggtactctcttgtggtgtaacctggagatctgcattcatggctgttgaatcatgtgtgtgcctaaggcttctaagatctggtcatgaatgttttgtgtgtattgcattataatacagccataatcctccaatgactgtaagacacctataatatttgcactttacagatgagggactgaagtgtcgaaagttatttattcaggaaggggacaggccccagggtttgtatctagttcatttaatattactgcagatgcatcactgactaaaatagaaaccaatcaaaagtagctgcctcttctcaaggggaattgcaaatactcaaagtcctccagtgccccacttcaagtgtccgttgatcttcaacaagtttcacctatactgcagtcttgtcttcagtgaaacaatgaatgtagacacctttacttaatagaggttcagagaggaaggattggaattaacaggtgtgttaggaaaatagagggacacccccccccacacacacacacaccatagtctctggtaatgacaaaacccaggatgccaggaaggatgctgttaagcatcaagaatcaattctggtttgggtggatcttcagttccacaagaaaaagtcatgtagggagcacttcccagagttctgtaaagtggcctttttcaacccgcctgcttttctggtccccatatatagtctgcaaagtgtttaaaatgtaactatttgcagaaacgtgtgacttgtctgatttgacacccacatgatgcacagtacgattaaggagtttcacaatcctttttatggtttcaccaacacttgctcatttataaacatttagattctacctctaggcgttcggtttttggttttttttttttttctcttcttctttgtttgtttggcttttttgttttttagattacaaacaaaactttcacgggttgctggttttttttttataaagtttgttatcacctccgcccaaactacagttcttgtttggtcaagaaaatgtttgaagagaagaggggaaacaattaaaacttaaaaaaaaaaaagatagatcttttgagtccttaccattcttcagagctcaaaaccctgtgtttacagaatactcagggaaaaaagaaaagaaaaagaaagaaaaaagaaaaaaaaggaaggaaagaaagaaagaaaaaaggtgaagaattaaaattaaaattaaagtactttctgataagcaatatcaaaataattggcccagagctcaaccaagaacttcatgctggagacttaggtctccctccgggaccaaacgaccaaacaaaggccgctactttcggctgtactgggcgtccgttgaacccaggcaagagaagggtggtttcatttgctgtgtggaagaaatcttggaaaacaggaacatggttctgaaaaaccgtgtggtgaggttctctcacatttgttgccttttctccttcaggactgccgcttcgcttcgaagggaccgggccctctttgtcattcttcgctggagccgctctggagctagcagctgcgcctgggtgtgtagcaggcagaaagcaaggactaggcttctttagccggtgggtgatccgaaggcctgctcagggtgttcgagaccagcctggactgcgtctgggcacctccagcctctgggccctggaatagagtccgccctcccgcacgatttctggagcaaccgcaaatccaatttgggattttctttttcctgagcaaaccagagcctagaggtttctgctttgatgctggatttaattcgtatatattttgagcgagttgggcctctcctcgttttttgatctccggttgttttttttttggggggggggttagtttttgggtttttgttttgttttgttttgttttgatttttggtgacagttccgcacacccgcattctagttcttgtctgcctcgtgctcagagcttggggcgatgtaccaaagcctggccatggccgccaaccacggccccccgcccggcgcctacgaagcaggtggccctggcgccttcatgcacagcgcgggcgccgcgtcctcgcccgtctacgtgcccactccgcgggtgccgtcctctgtgctgggcctgtcctacctgcagggcggtggcagtgccgctgcagctggaaccacctcgggtggcagctccggggccggcccgtcgggtgcagggcctgggacccagcagggtagccctggctggagccaagctggagccgagggagccgcctacaccccgccgcccgtgtccccgcgcttctctttcccggggactactgggtccctggcggccgctgccgccgctgccgcagcccgggaagctgcagcctacggcagtggcggcggggcggcgggcgctggtctggctggccgagagcagtacgggcgtccgggcttcgccggctcctactccagcccctacccagcctacatggccgacgtgggagcatcctgggccgcagccgctgccgcctctgccggccccttcgacagcccagtcctgcacagcctgcctggacgggccaaccctggaagacaccccaatctcggtgagttaccttagggccttgagcccagtctgggacattcaagtttcccaactctgttggggttgaggaacatccttgatgcaaggagcctcccaggaaggcagcccagaagtcagagactccaggtggtggtggtggtgggccacagtgatgatgagtagcctggtcaccaggatccagcaatgtctgggtagcctactggtggcagtgggaggtgttgggttctctagggtcagctggaacagtctggatgtgatatctgggattcagcccttacttcctccatcccttcctctgagacctcaacaaacttgagacctgcgccatttggcaactaggttagaggatcccccagggttgcagatgactttcctgtagggggttttcacgccggaaataaatgaggagatcagcaaaggagaccgccagaggtgggttaaactggagcctagccctgcttgagtcctcaggcacactctggggtctcatggagccactcccttgtcagatactttaggtcagtgtctggggacagtgcagagggggttttttctagtgcctggattaaatggagaatttgtagggctgcctctttctcaggaagccagattaaccttaacaatggccagtatgcccatccaatgtcagactcggagggacagcaacttgcccacttacacaatctacacactgaactaactttcagaggggccctagccacttgggccaggggaaagaaaggaaagtggctgtccactcgtacaaaatgccaaagagcctatttctggaatggaatggaggtgcagtttggatggagctggctctaggggaagagaggaagcacagacttgagaaacaaagttaatgtttattgactacctactaagtgctaaatcctcttgcatttgctgtcactttgaagagtaaagtctatcccttgccactccctgggtggccatggaaggtccctcaagaggggggggtctagccaaacatacatctcaggtacactgattaacaggaaaagtggcgccagagatgggtttgtggctaccaatgtcttcctccccccgcagggccaagaagacaacacccagaggaaggagcacagagcagggtggtagtttccatctggttgaggctggaagttagtttgtggggtggtattggcctgaatccttagtagctgggttcccttcaactccacccaactcctagcttaaaataagaaggaataactgggtgtgatgccccatgactgaaatttcagagagggggaggagagcctgggatacatggcagacccagtctaatttaaaaaaaaaaaatcctagaatcgggattcagtgtttggatacagcaaagagtgaagtccccattcaaagctgaagaagacattcctgtattcagtataaaagcaaaacaaagtgacattgtgtgactgtacccgtgagcacgggagctgaagaaggttccccaaattccaggatccacacagggcaaacaaaacaatagggtacgtgcatcccctctctctttaagagactatatgttgggttcttgtgtctgccctacaagtcagcacatgagaccctttgccaagtctttaaagaaatgatctgggattgtcatgagggagcaccaggcatgttgagaatctattgtcatgcttccatgtgtttgggagatatacttgggtatttttgcttgtttgttttgtttttgtttttaatcacatagcccttgggacgatctgacagtctggtggcactgttcagttaaaagtgttctgtgtgaagatgttttcttctccagccctaccctaggacagaagattagacagtctctgacataggttggataaaggctctaccactaagagatagtcctagctgcttccttcctacctgttttgtttattgcctgcctattcttggacattagtcatgcttggtagcttcagtgagaatcagccatcatactagctgatggtaccaagtgcctgaaggagaaaggttctctgggctaattgagaggccccctttggatagatgttatgaccattgaggtctaaaacggcatatagcatacggatgggatcaaaggcattttggagccaccaaacctcagtgccatgtgaccttgggcaagttgcctacctctgtccgtctcttctcatagtctgtagggtggcttcagttcagctccacttctcttagatgactttggtaagctatgtgatgtctagtaattgctcttttataaatgatagctcttttattagtttttctactttttctggggctaaagggcttcctgggacttggaaattttagtattaaacctgggacagtctactgagtaagaatagttggtttaccctagttagatatggaaatgtataaatagttaccctaattagatatgagaggttttgaatgacttgtggtaaggggagatgagctgagagccaagctgagaccgcaggagaggagctttcctctgaagccccggaagtctccaccgaaggcaccacagcaaagagtctggacctgcagttacagcatgaaagagagaaacacaagctcacgtaccccacgcatgtgtagaactgtggaatggtacaatatagtttgtgttttgctttagtaacagattcatctccaaaggtaaatctcagagaccaactcctaagtctgaaatatttttagtttgtgttgaggaaaaaataagcaaatgtcattattcctttttatgaggttgaactgttttggtattaatagctaacatctagtaagttcttgggttggctattagaataaggcaaaactaaaactaaaaataaaaatgataaaacccaacagggtcatgtgaaaatacctgaagttggcaagggataaattattcttccctgactgtaatatatgtgaacttttgttcattccaagttcaacagacccaggaccctgaagcaattgttagaagcattaattaggcacaataatggaattctgtgaccttactgagacgggtacagagtcttactcatacataggtgcctggcacatgctgggcaagtagcaaatgtttgagtaaagatctgggaggtaattgccccaggactctgccctgccctggtcaagccgcacagaacgactgccttcgtcctttaagaagcaaattagaactgggtgtggtggcatacacctgtgacccagcactcaggaggctgaggcaggagaatagagagctcaaggctagtctgagctccatagcaatcccctgcttaaagaagaaaaaaaaagcaaagatagaattagagactcggagaagagtgagcagaactggcgaggacactagaaacctaggaccactgcagacagctgggctctgagcctgtgctgctctctgtgaacaggtgttagagttaataatactggagtgtttggctatggctgtcacaaagtgtggtgcacacagatcgtggcttgtcttcgtgtttgaatggggtctggaggtccagctttcatgcaggctgcatgcaccgctgccaagacagctagccatgtctagttcttacaacttcagggcggcgcatgtgcactgtgacattcctgcagcagagaaaaacagccatctctttttaaaggacacagtgccatgaggaccctgctggagacatttggttaaattcatggagatgtactctttaaaaaattgcttttagatttatttattttgtatgtatgagtgttcttcctgcatgtgtgtacagaagtgcagtgcagaagccagaagagggtagcagatggtctggaactggagtcaagtgtggttgtgaaccatcgtgtgggagctgggactcaaactcatgtcctctgcaagggcaacaggtgctctaaactgctgagccatctctccatcctgagatatattcttaaagtaggagacttttattgtgtgtacgacacatcacagtctagtcaattttgtgcccattaaggcttatatagacctaaagccaaaaaagaaaccaaaagaaaaaaagaggagactgaaagagattagatataaaaaacagaccttgaaatgtattgcttgtagctgttactgggatgtctaagaaatatagcttactaaggaagagcgattcttttatgtcttaaagaaataagtaaccgtactatttttagaggatttggggaaaaatatggagttgtttgagggctcagtgagaataacagaaggaaacaaatgtgtgcattgctatggaaataacccaaaaagggaaaagtattgctccatctcgagtggggtggggcggttcaaggtgttcagagagttgaagactgaggtcagcggaaaatgctgtagtgtttgttgggtcttttggggactgctttatcaattaggccagttgctttcagagctagttcgcttagacagggaactctgtgatccctgaggtagcctgttgggctcaagaacaatttgttagtcttaagaaaatcaaagttgtttaattttccggttaccaccctgaataggccaatcaaagtgggaactggtttgtggtgctaagtggagaaccaattaagtaaggaaggtgtgttggggtagcctggggtgtgtctcgacctctagtgacacctgtcacttgcccgtttgtgtcccatgaaaaggtcaggccacatttgctggtggaatatgctcaggagacagtgtagataatggcttcttctgtccccttccctgttatttatttttcccccctctttaaatgcactaagaagacaaacagactgtgaggtgtgggggacaggaactctgatacctgtgggtgggaatgttcatcggtacaagctttgtggatagtcgttggtaaaccagtcaaattacagagtagatagcccttgacattgaacttttgactccaaatcatgaagtctgaggtacatatttgccactttgtcacccataataacaaagctcagaagtaatacaaatgtacaccaccagggtatacatttcatatgctgtacacccacctaggcagatatgatggctgtcattattaggccacataagatcctttctgagccacttggaaatactatgttcttggtgttaaacatggggaaatacattgtatttctttgaaaatacacaattatctatctctaaaagccttcattgggccctaggtaaagaatttgtaacattgattatttatggggagcccaaagggtagaaaagggatgaagttggagaagcagcttgctacagccatgtgtgttgcaaaattgaaaatgtgctttggtcggcttaaccctttttgtgcttcataattctatcaaataataaaaatactcatgtcatgggtaaaggaacttgtggctgacactgacagcttgagtttgatccccttgggccgacatggtaaaaggaggtgctctgacctccacacatgcactgtggcacacaaatgcacgtgcacaaacacacacacagacacacacactaaataaacatataacttttacccactgagccatctttctggccctgatactgatactattttcttcctcgtcacaggaagttttacgcatgcgtggtgttagggctcagcattgctggacgatggatcttgagaatgtctctcattctgtagaacagcaacagttccgcagttcccgctctgtccgcttagtctgctttccatggctgtgactttgattgttctccttacatcctatgagcaaaattatacaatacttttatctcgtgtgtcaggtgtatttcactcagtatcatgtcttcaagctgtaccatgtagcagtttcctcctttaagctgaggggtaggccattgtgtgactacattgtctttgccccttcctatgtgtgtggacacctaactggctcctacataccactgtgcgtcctcatgccctgaatgtgcaacggaatcttttgaactttaaaaacagaatgatggttaatcgcttttaaatactataagactgggtggccaagttggctcaatggataaatgtccgcactgctgcttggtgcaattgtgacggcctgagtttgatccccagggcacgtgtgaggatggacgcagaggactgactccaaggttgtcccctgacttccacacttagcatggcacgtggaccccacgtgataataatgatgggaagaaaagataatgaagcttttaaaaacagacacatcattcatgaaaaattttaatggtgtttatagccaggcaggaaaggcacattgatttttattttttacttggtttattcctttacaaactcctggaattccccccatgccctatttcaagatcctgatgagcagcttgatccatccttacctgtaccctgaatctgtctttcaactttgctccttaactgaggacagatctcgtgctgtggcaagtcagtctgcagctgtggggcacccctaacccctacatcccctcctgggcacaaacacttagatctggtagttagtgaccacttctggtggacagttctccttcaagtgatattaagatcagaacttgccggaaaaccaccaaccttttaaactggtcacctaaactgccctttaaaaataaaggagttggggctggagagatagctcagatggtaaggtggctgccatgctagcatgagaaccggagttcaaatccctaacatccctgtaagatggcattgcaagttgcaactgtggtgctggagcaagaggaggggcaaagataagctgatccctgtaatctactggccagtctagtcaaaccagtgcgctccagggttagcaggagaccccatctcaaagatgagggccagcaagatagcatttgacgctaagcctgacaccctgagctaagtccccagatcctccatggtgggagaagtgagcccactccccgggttgtcctttgacttgcacgcatgcaccatggcatatgcatctcctccccaaaataaatatacagttttttaaaattaggtggccagacggtggtggtgcacacctttaattccatcactcaggaggcagaggcaggtggatttctgagttcgaggccagcctggtctacagagtgagttccagaacagccagtgagcgatacacagagtcttggggggagtaggtgaagagtgactgagagaaacacttgaagacaccctctggcctttctgtctctgtctgtctgtctgtctatctctctctctctctctctcacacacacacacacatgcacatgtgtgcactctgcagttaaatgtgctgaatttagaacagaagtcattgcaaaaattgttgcttctgctgagttggggggtgatgggagaaggggggactgtaggagggtctcgttgggttttctagaagcccaattcttttgaaatggcctgctgcccaaaagacgtcccagggaactggttgacctttggtagatcatgatgaggcctcgtgcagcattctctgagtggattactcacacattttattggctctctatacagctgctctcttgtcagcttctgaagaaaaccaggaaaattgtataagcagggatagcaggaattaaccttgaatccattttaatctatgtaaagtaaatttatagtctcggtcggtgaacatgcacttaagaacaaccttttagagatggcagccttacactacacaacaacccactgtgagaaggaagttggaaggctgccgctgactgctgactgggacggctaagtcggccctggcaggagtagggtggggtgctggcctctgtttgctggaaagaaacgaatgctcagaaagccttgtgctccccgtccaacactaccagcaagcaggagctcctgcttagcacagagagaaacctctttaggtttgcagcttccttctcctgtagactctgctacaccgagccttacagaattgttaggctcatggcagctaacaggctcccttctgcaaggtagcttttcagctaggcctccttgcttcttgtgggctagttagtgtttctgcagggtctgggtcttcctgagtcctcatcgcgtccattccttcccgtttacggagctggcaagggggtgatcacatcgataggaacctcagatgtgtatacccttctcagcctcctgaagttgatctccagagaatgatagcaacctgccgaattcagagctaggtgttcccctaactttagacggactgttggctgtttaggaaaatcaaaaccccaggattctctttaaaaacttctagaggcatctgttccctcttctccaatcttcaatgactgtctcagatgtatctgtgataggtagagaaggagaggagcatagcagaccagctatgtttttaataaggacaagtacgggatatgtatgcagaccaggaaggaaaatgcaacctgcaaaaggttgctctgcatggaacccagcttccagagatgactttctcagggttggcaggtggcctgtggttttatctattgctgctctctaatcagaattgggccaggatattcaaacttcttatctcagtgaagagaatttggttttctggcttttggcatttttacagtaagtcatgtactggactcgatacacgacttaccgtagttaaaatagccttctctactgacaagtctaatcaaggcaggtaaagcagtctgtatttaagagtcataaaagtgcctctgtgagtgggatctgttgctgtcttaccctgtgctgaacagccgcagacacactttatttttcatgagaaatgaagaagtcacacatctaggatgggtgggaatttttataggttataagcgccactctgtggggtctcccaactgtggatgaccttagcttccttttccttccccatttaaacatccagttctacttccagaaatccagtcaaactttatcaccttctctcagaactgatcgatagcaactggtgagcaggttaattataatcacagaataaacgcagaagtctcaaagttcaccactttgcaatgttttcagacccctccgggaccatgccaagaggtgctcattgacccactggagcaggtgtggcagtttgaagcaggggcagacaatcggatctgatttgggacaattcaattgtttcttatctgcggcttcccctatcctatgaagtctgtcatttcagataaaaaggctcatccattgagctgcgacatggcaggctacattctcctctgataaagttttctggttgtcttatcagattaggctaaaatagttatgtgcctgcgtcaaggtctacagggacctattcagatattttatcaggtattagctcagggggacgacgcgccccgcccccctgccccctttctttcttcgacctaggaaagaatgacctgacttccaagctcataaatcagtcccggcgaagagaggtaataatacaagttgtccctcaaaattgagtaggcagaaaagcgaacgacaaatatgacctttccctagcttgtaagaacttcacttgaccctgcatgaagaatgtggttcccatgattgcagttagcaggggccgtcgctgatggggaggaacaagaaaaagagaaggatgttctccagataaagatgacttcagaaagtcacatatttatttttcccatctcaggaaaactttaattatctttcttctgtacaactgaatgtataagaatatggcaaaatgaaaactcccagggtacctgtcagaagtcttagcacaccgagctcgccagtgctaagcagcaatccccggcgttttagttgctgtacacatatataagcatgtatatacacatgttttttaattatcgtaaaagttactgtttaaaggcactcatcactgggacagttttttaagattcatgagccagcctagcttccaagcactggtcccctcgataaagcaaagttagaggattagtcgcaaggacaggcattgagagccatccaatgcaagaagagactctgagagctagctgatgcaaggctagagcggatttactctatattttattatttattgttgtgctagggactggatgcggtacctgggacctgctaagcacgtcttctaacacagctatcttctcagcgtatttataagttcttaattgcaccctttgaaatgaagtccttcttgcaagctgtgttgatttatgaggctggaaaatgtgagccagagttgtcaacttgcagctaaaaagggttccaggagcagatacagggaggtgacagttcatgggcctggtatcccagagctgcgagtctgtggattgttttcctgctgggtgactttgagccacttacacgacttctctttgcttgcatgtctgcctgcattgtgaaggaggcggtcaggcaaaggaatagtgcaatggttctaggagctgccttagggcccttggaggactttttaaacatttaattccatttttaattatacatatatatgtgagggtgtacatgtcagtagagggtgttgatcaccaggaggtgaagttacaggggtttgtgagccccctgatatgggttctctgtaagagcagttaagagctcaagaccattgagcggtctctccagctccaagggagacttttaaaaaatcaacatgccagccgggcagtggtggtgcacgcctttaatcccagcacttgggaggcagaggcaggcggatttctgagttcgaggccagcctggtctacagagtgagttccaggacagccagggctatacagagaaaccctgtctcgaaaaaataaaaataaaaataacatgcctcatatgggtaactcggaccatgtcgtgtagacgataggtaccagatagcagcagatgtgccttacactggtagattcaagaaggtttccatggctacctgtctcaatacccaacagtgtatttgaaatgacagattatatgccatgattcaggtttttttttttctacataataagccacatgacccactaaaatatataaaaatcagcttgtgggagccatgggtggcaatgtcaacgtagatgcattgttggttttggtttattaatgaacccactcatgggctggagggatggctcagaggttaagacagttcttccagaggtcctgagttcaattcccagcaaccaaatggtggttcacaaccttctgtaatggaatttgatgtcctcttctggtgtgtctggcagctatagtgtacatatatataataaatcttttttaaaaattcactgttagagatcctaggaagctccagagagtcacagaatgtagagtgggtaccagacacaatcctttcttcctaggtcagcaagccaagaagcatctctgcagactctctgtgagccccacagctaggctctggagataaaaacataagcaagacagtctctaaggagttagtgcgctctggctggagtgccagtaacacacaatatgtacggacactaaacagcaagtgtggctataaaagggaaacttccattatgcaggagcccatgtgatacctccacctgtgttggtacaggaactagaggccaggcttcctagaaaaggggatctgtgaagtcctacaggctaaatgggtgttagaatggggaagatccatactgctaggctatacagttacaagttagggctggggctggagagatggatcagtggttaagaacactggctgctcttccagtgttcaattcccagcaactacatggtggctcaaaaccctctgtaatgagatctgatgccttcttctggtgtgtctgaagacacattaaataaataaataaataaataaataaaataggggggaaaaaaacaagttaggactggctcacaagcagaggaacattgaaagagtcaagacagggagggcccgggggagttagtagacttgaaaatagagcagggtttgagtcattcttgggtcttagcactttggttttgatgaggaaagggttagactagagagtcctgcttttgtgtacttcagtcctgcagagtgataactgcctctctccattctgcacccgtgagagactcccgtgaagcctctgattcaatggagcctcatggtcatgcacactgggaagtttcataagtattctttttttttagtaattagttttaatttatttttccccctaagatgggtttctttgtgtagccctaactgtcctggaactcaaccctgtatatgaggctggcctcaaactcacagaggtctgcctgcgtctgcctcctaagtgctgagattaaagatgtgtgccaccacactcggcacaaaggtattctgaagctgtcaagcaaaggcagccgtgtggatgcactcacgggggtgcactcacagtggcctgatgttaaggctgagagggtaggggcaaaagggaaccaaaccccaatcctccacccaactctggggtgcaagaaaggcagtgatctgaccctaggaggcagtctgtcctagccctacctccttgcactttgtgtaacaccatccacctgtgttttctgtaatgtggtaaatggtgggagtggctttacacaggaatggcagtatttgcatggggaaaatactggtttgctttgcagcgcaaagagaaacctcagggtttgcataagcgaggaaagcactagccacacctccaacacgcccccatttcatcttattattttattaattttgatgtagagtcccaataagttgtccaggctggccttgaagttctttggtagctcagacaggcctgggaattctagtcctcctgcctcagctgggatataacagatctgtaccaagagccttgacatgtatttacacaagtatcagtggaccctgggagtacatttactaacatccctgaacatctctgcatccagaggaaggcttagagatgaagctgaaggagtctggttagcctgctttcctgtcttattctgaaggtttctttaaaatacatcactataatgtttgtttgtttgtttgtttgtttgtttgagataggctttctctgtgttgccctggctgtcctggaacatgctctgtagaccaggctggcctcaaacccacagagatcctcctggttcctgtatgttggaattaaaggtgtgggccaacgctaccctgccccagcatatcactataattttaatttcaattctcattaaactacccaggctggccttgaatgtgttacatagcctaggcacggtcttaaacttagatctgtctgtctcagcctcctgagcggctgggattgcaaacctgatcagtccctgctgcaaacgctgctgttttaactctgtctttccttcctcgtttgttacctgaaattcttcataagaaaacaattttcaacttactgaatgtttggccacctagagtagcttggcagggagagacagaataaatgatttctattttatttttcaatgttcaaagtaacaaatcccctcctccagcatcctcagagatcacttattaaactaaataactagagttcttaatatcccttttagacatcttagacacccctggtgtgttttggttgtgtgtcctgattgttgcccagatggtagctttttttttgggggggggggtcggcgggagggaaggggggggggcttgttcaaattggcttctgggtcatttgacaaaattgaataattttctgcatcacgctacagaaagtcccaagcttctccaatgcatgtttttcctcccccacctgagtttgatcaatttcttgggaaactaaggttgtctcctctgtggcaaaaccagagaccagtcagagccagctcagccggttgtgggttggttatccaacatgctaaagaaacaaccaagcaagcaaaaccacttcatgctggtgagatggctcagtgggtaagagcacccgactgctcttctgaaggtccggagttcaaatcccagcaaccacatggtggctcacaaccatctgtagcaatagctgacgccctcttctggagtgtctgaagacagctacagtgtacttacatataatcaataaataaatcttaaaaaaaaaaaagagttaaaaaaaaaaaggttaaaatatctgtatgttcacacccagtttcatccctgtcactgtgcagcccaggaatggtgttacacgtaccctagccttaaacttctaggtagaggtaaggggatcagaagcttaaggtcatctttagctgcacacggagcttaagggtagcctaggctacatgaccctatctcaaaaaaaaaaaaaaaaaaaaaaaaggaatgtgaatgtcttctgcgggcatgctaatttaccacagtgtgtccatttcatggtctgtttgttttgtttttttaaaaatatttgagccgggcgtggtggcacacgcttttaatcccagaactctggagacagaggcaggcagatttctgagttcgaagccagcctagtctgcagagtgagttccaggacagccagggctacacagagaaaccctgtctcaaaaaaccaaaaaaaaaaaaaaaaaaaaaaaaattgaaaatttattggacgccctggaactggagttacagatggttgtgagctgccacatgggtgctggggattgaacctgggtcctctaggagagcagccagtgctttaaaccaccgagccatctttctattacccccatctcctgtttttaatcttcccccaaagtcccaactcaaaagtaaattgtcctatgtcagcccttagtctgctttctgtctgaatgaatggctccagatatcttgtaccacatctatgtgctggtgactggcttctgtcaccggcttaattctctgagtttgtccttgattgcagcatgaatcagcatttcctccctctcaaggctgtgtactacgcctttgtatgtagaggccacattctgtgtgtccagccatcccttggtgggctcttgaaatgcttctgccttctggatatagtaaacaacgctcctacttctatatggatagtctattggagtcccggattcttcttcttcttctttttttttttaagatttatttattattatacataagtacactgtagctgtcttcagactcaccagaagagggcatcagatctcattaagggtggttgtgagccaccatgtggttgctgggaattgaactcaggacctttggaagagcagtcagtgctcttacccactgagccatctcaccagcccgagtcctggcttctctttctttagcacacacggcagaagttgtattgctggctcatgtggcacttccatgtggctctgaggaccaacccatttcccagtgcattggcaccatgtcacatctttcatgaattctcctatttagacaagtagccttgtttaaagcccttttgtacttatttattgtgtgtggagggataacctgtggacatcaggacagcttgcaggactcgggtctttccttttaccatgtaagtctggaaactgagctcagacatcaaggaagtaccttttatctgatgaaccatcttttattattattatcatcatcatcattattaattatatgtaagtacactgtagctgtcttcatcattattattattaattatatgtaagtacactgtagctgtcttcagacactccagaagagggagtcagatcttgttacagatggttgtgaaccaccatgtggttgctgggatttgaactcaggaccttcggaagagccatctttccagcccctgatgagccatcttatgggttccaaaatcccattcttttttttttttctttttttttttttgtcgagacagggttttcctgtatagccctggcaatcctggaactcactttgtagaccaggctggccttgaactcagaaatccacctgcctctgcctcctgagtgctgggattaaaagcgtgcaccaccatgcccagcttccaaaaatcccattcttgacaagtgaggcctttgatgttcattagtacccacatatcccataataccgttaccgacccttccactggggaagatgactgctgtatgcctgtctcagctaattcttgcctttgctttcacctttaatttagttttcttttgcagtacaaaaggcaggtccaggacctatgtgtgctgggctgcctgtgggctgcttttcttttggactttgggtttgcccccagtgtttctagctcttggctttgaggtcttttgtaacaacacccacctctcacctacaagtagcaaggtagccatggtggctcgtgataaagagggccttaaaaatcagttggaggaaggctttatgcattcagggaaggtgtaacaaaagccatacactggaaaatggggcgggggggggggaaccggggggggggggaaggagaggtgttcagacagaatcttcaagaattagtacatggcctgtgctctgccactctgtacctcatgctattggatttgccttcttggtttgcttgtttgtttgtttgttgttattggtttgtttgttgttgttgttgagacacagtctcatgtagcctggatagccttgcacaaacttggtatgtgctgaaggatagccttgaacttctgatctttctgcttcctcctgggatttagggcgagcaccaccacacccagttactgctgtgctgggggttgaacctaggtgtttgtgcttcctcggcaaacgctaacacctaagccacatctccatcttgctgctgttattttatttggtgtttcattggaccaaaaatgtctcgagggcaagaattaacactgcattttatctacgactaggttatagttaacatctgggtaaatgttcattcatgaaacaaagtataaaatcagcctgaagttggcaaactccctccattccacatttatgccacatgaacagtcttactgagactgctctcatagagggccatccttgtaaaagggcccttggagcagaggtctcatctaacatgaggctaagaggctggagatcacacaggactcctgtggcacatctcaaagggagctgggcactggagatgggagcagcatttggaagaggtgaatttgaggccagggcactagggcatccaggtggtgtccagcagacaattggtcatgcactggccattgctgcacattgtctccatttgaaaccttcaaaaccacaggagactcccagggcagcagataggaatgaagaggaacgaggagccatcccatggaaagggtggctggggtggaaggtgaaagtcacagtaacatgctgacagacaggaagcccaaatctcaagggctctccaaattatgccttgaaaaacataactgggctcaaacttttctcccatgatgctccaggcctccaataggctgccatctttcgtggactgtgtatatcaagacatggggtttgggcccacagtttgtcatttttcaatgccgaggcccaagtcctctctccctcaccctcctcacactgagtggagtccaggttccacagaggggagggagctgtgtctaacagtacctgcctctcagcctcatcttaacaaagggccaaggagctctgagatcctctgtagacacaaactcccccagtcagactctgtttaaatcatgtaagtgcctgttgattctgaaggagagctctgcctgccttcaagtgcttcccagaagtgacgagacactttgctttcggggaatgttgatattaagtttcctgccctatgtaaacacacctccagaagtggcactcataatggagaccttttccctggacaggactggacaaatagtggagaggagaggaagaagggagagctggccacatggacagtgtaactcgctatgtgtgtgaagtgggggagccctgttgtcaaactttctgtcttcatctgcagaacttctgcttatagtcctggccgggacttccagcttttctattacctggccgctgaaagatgcgaggcagcgtcttgtgaggagggagctggtttggagaatgacacctgatttaaagccctggttttactctctgcaatgtcctctacttttcacatctataacgtggacttgagggctaggggtgtgactcagcagaaaagcatctgcctagcatgcatgaggcctcgggctccatcccaactacaggagtagagggggatttgctgcctgtcttgaaggaagtagataggccagtctctgctgctggttcttggtgaaatgagctggacagtgtctcctagctatgtgggcctttcttggcctagagtcataaagttatggggtgtaatcttgggatgttaccatgactacagaggtgctagagctctagctcggttggtacagggcttacctggaaggtataaagccctgggtttgaacaccatcgtcacataaactgagcatggggacacacacacccataatccaacttgggataagaggctagagagtcagaagttcaaggtcaccctccattacaaagggagtctgggaatagcctgagatactctacctaaaaaaaaaaaaaagaatagagtagaatgtggaaaggaaggaaaggtagataacagatatgtgcacatttaccctcagtaggagtctttgtgtatctatcttcatatctcgaggggtgaaacagcagaatcaacagagataaatattgctcacttcccagaccttgggcagtcttgagtagtctggggaagctgggacatggggtggcattagacccccagtactcactgttccttacttactcatggcatttttccagtgactcccatgggcaggagctgcagtgaccatgggtatataaagaaatcacagttataggacctgaaaacacaagaggcctgccatgagagtggcttggcttcccattgcccgtgttagctgccctagggtctcctaagctgagtcagcaaaggggtgcggcagtagtcaagacttgacagatttaagaatacattcttttttttgtttttgttttgttttgtttttttgtttttcgagacagggtttctctgtataaccctggctgtcctggaactcactttgtagactcagaaatccgcctgcctctgcctcccaagtgctgggattaaaggcatacaccaccatgcccagcaagaatacattattgaggggctggagagatggctcagaggtaaagaacactggctgctcttccagaggtcctgagttcaattcccagcaactacatggtggctcacaaccatctgtaatgggatctgatgccctctttggttttttgagacagggtttctctgtgtagccctggctgtcctggaactcactctgtagaccaggctagccttgaactcagaaatccgcctgcctctgcctcccaagtgctgagattaaaggcgtgcgccaccactgcctgactggtaaataattatttaaaataaaaagaatacgttattgactaaacacatagaaacacaattgcccaaaggtggcagcaacctcgtgtccaccaatgggccagtggaaattaggttgttgccatctcgagtagaactattattccaccttaaaaaggaagaaggttctggaatatgcacaccagggataaatcccaaaggatattatgttaagtgaaataagccaatcatgaaagaaacaaatgtacagttgcccttgtatgagatataaagagaaggtaagttcacagcgacggtggagaggtttggtgttagtagttgcagagttttggctttgaattaaaaaaaaaaagtcaagctgggcgtggtggcacacacctttaatcccagcactcgggaggcagaggcaggcagatttctgagttcgaggccagcctggtctacaaagtgagctccaggacagccagggctatacaaagaaaccctgtctcgaaaaaccaaaaaaaagtctccagagattgtttgcacaatggtgtaaatatatgaaacactattggactgtatctttagaaatgcccaagatgatacattttatatgtatattatcataattaaaaatgcagaaaggtagaaaatatggaaagcatcatttatagagagcaatggcttctcttcccaaaaccctgttctctttccttccctaaagatagagagaggatatggtagaactctactccagaaatattttttgtctacatggttactttttctggaagcaaggtcttggatatcccagggaggcctgggactccctctgtagccaaggatggccgtgaccttctgatcctcttgaacctaggcacgctaggaaagccaactgagccaactgtcaactgagcggcttgctagccctgcaagactgttcttctgtggctgtaactgctccatgcttttcctaggatgtaaaaggtggattgagctcagggccttttatcatcaagctgcccaggtaggatgggccaggtgcctaacctcagagagtgcacggagtcactgagttgggtggattctgtgtgtcctcctgtaggattgtggagaggcttcacagcatctggtttgtttttgattttagatgtttgctaggcctctgaaggattctgaggctagagacaagtaaaggagaaagaaaataaatccaatgaaaacatgaagtatatttaatagctacacacttacgatttaattcagcaccaaaatatagtttgggagaaaagagcaactgttaattttgattgccaatttggttggattaagatatgtctagaggaggttggagagatggctcagagaatatactgcttttccagaggaccaaagtttaatacctgttgctcatgtaaggcagctcacaaccacccgtaactccagccccaggagacccaatgtttctgacttccgagggcacctatactcacatgctcatgggcacacacatacacacacacacacacacacgtagggggcagaggcagagagagaaagacagacagacagagacataattaaacaatgtttaaaaacaaaagtaacattatttaaaaaagcaatccacagggcactgaagacacacctttgagtatgtttgtgactgtttccctagaaaagattgaattaggagggaaaaactaaacttagtgtgggtagcaccatcccatgagccaaggtcttggaacacatacaggaaaacaggcaaaggcaaggtgagcgtggcatcacataagaagcagctgccacaaactcctaccaccacagatggagccccagcctccatgcccctgccctgtgatgggacactatcttctcaaacagcaagccaaaataaatggtccctccttaagttgtttctttgggacattttatcccattgatggggatctaaatgatatttcaatgtgagggtacaacaggtgacttaagagaaacatgatcagctgccatttgagcccatgaggacactgtagtggcctgaagaggaagaacaggtgacaattggagtgagttgtattcaaatttgaggcacacacagatttcctgagagatgacagggtaaaggtatgccttctccccttcttctcgaaagaccactcccccaagtaaaacaaaacaaaacaacgtaaaagtctcatcaccaacgaagttagagggcaactcatgcccactatgcctcactgagggaaaagctgggagcctgtctcagacctccggctgtgactcagtttccctgttaaggaaacaaatgagcttggaaatgaaatgtggaaatgttagcttcttagctgaaagactgtcagcttggtaaacaagtgggatctgcctggggaatgctcataaaactcgtggagaggcattgaaagacacgggagtgggaaagacaccagaatcttggagtaagacacagaagatcttctattccacctccctcacacaagtctataaatttaatgcagtcccaggaaacagcccaataggatttcttaaatgcaacttgtcaagttgattataggatttctggggaagagttattgtacgagaatagccaagataatttttaaaacaaagacttttcagaaaggggaaactttccttatcagaaatcaaaacaaactaaagaggtcctggcacagaaacgcacgcagagatgttcattatagccccgttgtgagcgaaagtgaaaaatgacttgttggaagccggccaaggtgttaggtacagggaggcgagcacagaaagactggtgttagcacggcttcctttcgagcactagggacagctgaccaactgtagggactgagaaaccaaatgtaagtgctatgaacctttagagtgtaaaactaatcaagtcctctttaaaaagtaaagttgggggaagctctccggagagatggctcagtggttaaggacactgactgctctgccagaggaccagggttctgttccgagcacctacagggtggctcacatccagcagtaactctagttccagggggatatgatgccctcttctgaccttcacaggtattgcatgcatgtacacagacacacagacactcatacacacaaaagaaatctagagaaagtatccaaggagctaaagagaattgcaaccctatcggtggaacaacattatgaactaaccagtaccgcagagctcttgactctagctgcatatgtatcaaaagatgacctagtcggccatcactggaaagagaggcccattggtcaggcaaactttatatgccccagtacaggggaatgccagggccaaaaaatgggaatgggtgggtaggggagtggggggggagaaggggtgggggacttttgggatagcattggaaatgtaattgaagaaaatacgtaataaaaaatttaaaaaaatctaaataatatctttaaaagagtaaaggttctctgtgcagttgtggaaaatgtcacacactttcatgaaaaatcttactatagaagaatgtgtatatatgctttttcctaagactagtatgcatttctctcttctgtcaccctggagatagggacttgggaaagggacttacctttgtgtcaccatacagtcatctaggagagggcttttgtgttgctctgccatggaatgtatgattcaacttcattctaaatgccagcaggcgggtcagcaagatagccagcgcagtaggtaaaggctcttgccaccgagcctgacaccgagttggatccccagatcccacctggtgggaggagagaactaactcttgaaaattgttctctgatttccatacatgctccacggcacatgcatggctcccaataaatgagaacataattaaaaattaaaattccagaaggaatcacacattcatatcagaactatgactagcttacaggtgatgcgtaatgtgaacagaaaaaatgcccttaatattataagctcattgtaagttctattgatatttggaggatgcttgctaccacataagctaataatagctgattggtgtgtttgtgaattgtgatgttcagtgccctcaagtgaggtaaaggagaggtatattttgtttcctgaaaccgttctctttttaggttttttgaggcagggtttctctgtatagccctggctgtcctggaactcactctgtagaccaggctggcctcgaactcagaaatccgcctgcctctgcctcccaagcgctgggattaaaggcatgcgccaccaccgcccggcatattttgtttcctataagggcattaattccatacatgagagctttaatctcatggcacaatcatctctcaagagccccatgccttcatgttcaggctaaaggagcacaaaatatcataatgagacaatggataaggaaaatgtggtggctggatgcaatgaaaccatggggcagtacatcaacaggtccatactgtgaggatggatctaagataggaattgtggcttatgaaagggaaggggctacatccacaatgctttgtttgtttaaaatgaggtaggtcagcacgtgtttggcatgcaggaggctgagttcaatcctcaatgctgaaaaaaaaaattctgaggcaaacacaaatatggcaaaataattcagatttgacaaggccaggcagggggggccctatcgtttgccacattctcatttactcagtgactgaaatagtttatgtttttcaaacataagtaaaaattcactatatagcatgaagcactcctttaaaatttttttagaaagcacaaagtaatatttacattgttcagagatttatttatatgtgtgtgaaagtataaaagtggaccagagaatttatgtgctgccttcaaaaaattggttttgagatggtaaagaataaaaacattattttttgtagcttcctactatttaaaatttttcataacaataaaaattataattaagaaaattgacatgttgaaaaataggaccttgtcggccaccattactagggatagatagtagtgacagtagagacctttaaaaatgtgacactctcctaaaggatggtttggatttttatagcaattttgatttctacagtacaaacttgtaggaataaatcaggaaaagaaaacctaaaagtatattcacgaggaacattataatggagcctctagtcgggtggtttggcagagaggaagaaccttagctaagcattatttattttatattatgaatgttgtgcttgcatgtatgtctgcgactggtacccttggaggccaggagagtgttagaactgtagctacaggcaccacctctgtgtggggctgcgaatccttccaatgctcttagcagctgggccatctccccagccccaaactcaatccaatctccagaccctacagaagaatgtcattgaactgtctttatttattttttgttttgttttctgttttaccaaactcagaactggacagaaccttgcctgctcatatcaagactctgcactcaatgcagaaagcttgcagtagttcagggtacctgggtggattagcgggagaagatgttaagtgcaggggatgggggcttaaccttggtttgattaagtaatccctgagaaaccctgagagggaaaaacagactcagtggatacatttcagcactctggtcccctccccctttgagaaggcgtaaatctcccctgaaacacctccctagtgttcagggcaataaagaggtcacattatatctccataaatctcccctctggctggctggctgctgccattctgtcggagaaaggaagttgttttccttctgacagtggctgcaagcctggaaggaaaaggctttccccaaagacccattgtctcatccccaagggagctaccctggtaatttgttcagtatttccgtctagactgccagcctgcaatactctggacgggtgcagaggcaaatagtcaaggtggcctgtcccaggcctctcctgggaaagtcctgcctcagacttcctagtaaagtcaaggagcactcgagtaacttagcttgagatgccaagcagagccagcagcagcactgggggccctgtgtactcacctaactgtgccatgcacaggcgaggaaagctgttacatactggggcctgcgtctgcctgtggagccagcatgagactctggtgtggaatgagggggcggaggaaggtgatgggacagcagagtggagaaccacttagaaaaggttgtgaaataagatgcttttgtgggaaggtaggacaggaggggaaaaaaatcaaaacacaaaaccttcctggtttcaaaatgtttctactacatggagcagggatgatgccagattgtgacattattcagtcacaatcctgaccatgcaaaatacttactgctcattggaaataaattcacagtattattaaaaaaaaaaaaaaaagctgtattgggctagagagatggctcagcggttaagagcactgactgctcttccagagatcctgagttcaattcccagcaaccacatggtggctcacaaccatctgcagtgggttctgatatcctcttctggtgtgtctgaagacagctgcagtgtactcacatacataaaataaataaattcttttcttaaaaaggctgtactgggctggtgatggctcagcggttaagagcaccgactgctcttccaaaggtcctgagttcaaatcctagcaaccacatggtggctcacaaccattcacaacaaaaatctgatgccctcttctggagtgtctgaagacagctacagtgtacacacatataattaattaactaattaattaattaattaattaattaattaataaaggctgtattaagtgagaagtctctctgggctactaagatgtctctctggaagtgactggtattactgttcccgctctgtctcccatagtctgcactgtgactacaagcagatccatctctaggctcttccctggtgctcgctctctctctctcactctctctctctctctctttggtgagaggcagtgtgtctctgtgtgtgtgtgttttgccctatactttgcttctgatgttttgtcatacgaactagtaagactttcaaatcagtacagagttcttcaggctttctggctgttctatgtgttctctcactgaagccaccagttccctagggaaggatatttgtgttgtctttccagtctccttctattgcagaaggtgactcttctcctcagaagccatttacacaagggtctatacactcacagcacactcatctctagaaatggcatagttggatcgattgcacacaccatttatacttgagatatggtattaccaagtcgctatccccctgggctgagccacacctcctgtcacatgcttcctgtcacaggcttcattatgccccggatgcttttctcgccttctccccagggcaccccaaaaagatggaggtaggctgggaggaggctgggaaggaacactggcacagaaaccagtgaccggaggaaacaggaccagtgctggactttgtccactgtgtgggtggcagcatccttggataagctatatgtcatgctcacatttgctgggactgtgccctggagagagagctttccttctccctctgcagaaaacacgatgcaatggtagatacttgagccaggtgaggctactgctcttgacaggagaatcctggccctgaggagaagggactttgtgggagatgtttagtcacccttttatttgttttttgttttgttttgttctcttgtcctttcatgggtgcaccatggcactcctgaggtagtcagaggacagctttcaggaactggttcgctcctaccatgtgggctccaaggatcaggtcagaaagtgactttactagctgagccacatcactggcccccatttacttgtcctttgagacagagtctcttgtatggtaggatgtttcaattgagatatagcttctggaagctgtctccacctcccgagtgctgggattacaggtgtgcaccatcacgactggctccttccatctattttgagacgtgactatccaaggaattattaaatgggggcagggtggagtagacatctcccatccttcgcatgctaagaagacttattgagttgcttgcccatttaattactttaaatcatgtttgaggaaggaaatcttaatatttctaatataacttatttttcttaacactactccaatttttatttcttgactgaaatttctttttcttcctcctgatcactgagcagttaggtcattttcagtattttgccatgaagatatttaaaataaatatttttcctttggagaattttccagggaattattggagtcgtggttatgcgacgtggtgctctttcccacaggtacacatccatgttagttacatgtgcatgcacagttttgtacacatgtgtacaggtgtgttcttgctaacctctcgtgctgcggagataactctcttagaccagtatcactgtgactagggacagagtccagtcaaatctgtatcaccctcctgggtgccccaggagacacttggagaaggttcagatctttgtggagccccatgggtcagtgtagattgagttcatgttgtgtgcagagcgctacagatggaatgacccagagggcagcagtgtggtgtgggggagggcagggttaggtcactggccttcctgggagtggcactctcaggtcatgtgtcttcttctctagaccttgatttcctctgaaggttcatgaagatgctcgtccttcactgcttgcttttaggtccacctttgctgtagtagtctccaggcgccccaccacccgtgagcccacatgtgggaaggagggaggagctgcagagctgtcagacagccaggtggagggaagagagggcaccatggggcagaatccagcaaggcttttgcttgttcattcatcaggactctatgggtgcagccaagctaatggctgctaacctaaagcctggagagctctggcgtgtcaccacaggagacacggtgatggcgggatttactgaaccatattctgagcatccattgaacaccttatctgggagggtctggctgggacaaaggaagttgtggggtttgttaccatggtacttgcaaaggcccaagctgcagagcacagttgtctaggacagaatcgttgctgaggcacaagtattcttccggggctttatggtggatcctgcactctgcatggaagcctgttctcatcatattctggaaggtctgctcacaacagtgatagaggctgggaagcattcttctagtggctacacttcagggcaatgacacgtagttgcccctaaagctttggagaccagacatgctgggaagacagcatgtttgggtcctggactcttcttggctctgttgctaacacattctgttgagaataagcttcacataacagccagaaagggttgggtcagggccaaaagtcacaagatcagtagttagcaaatgatgcctgtttttcaagccatttctacaaaccatccctcagttgctccttaccctgggctgacctctaacactgactcaacagtgacaggccaggtaggagcaggagtagtaggtagttgagactgtgggactttctgagggaagaacttctggttctcagaggaaatagagtggcaggaccatgcctacttatagtatgtgaggcctctgagtattagctcttgacaaaaagccgaagatactctctttagtcatctgttcttcaactttcctgtctaattccccctctccccttccctcttttctttccttcctgtcttaattaggatttccattgctatgatgagacaccatgatcaaggcaactcttataaaggacaacatttcataggggctgacttacacattcagaggatcagtctgttaacatcatggcaggaagcatggtagtgtccaggcccacacagtgctagaggagaagcaaagggttctacatcttgatctgaaggccacaaggaggagactggcatccttaggcagctaggaagaagctccctaagcccacccccacagcggcacacttcctccaacaaggccacacctcctaatggcgcccctcactgggccaagcgtatacaaaccaccacatgtcctcttcactgggatgatgttttatctctccctcccttcttccctcctttccatctagaacatccttgcccatatatgctgtttcagaacctgagtcacgttttagagtccctataggcctgaggcttgtcccacatggacactggcattaaagcgtccctgcacagaagtagaggttaaggaggccttcacagggtatatgcccaaggcctagctgtgtaactacttatgatccacactctctgagtttctaaaataggtgctttaatcccatttgagcaccataggagcagtggccctcctggccagccagcctcctgtcacaggcttctgctgccgcctgagaaagcccagagggctaaagcttgctcagctgttgccagaaaaaccctggggtttgtttgtttcctattccccagatccaggcgccagccacagggatagactgagtgtggcctgtcaggaaatccaatgtactaaactttgactgtgtgtgagactggagttcagcatgggatgtttgggtggggctgtggaattcccactcctgaagcccccccaagcccagggaaaagtcccttgcattcagttcaggctgtgtctaccctgttcccctcccacacaaagattctcctttttggattctcttctccttctggctcttttcctgatagctagctaccttgggcatggacatgatcactgcatggtgtgtcacccctctttgaatacatggcacagtgatgtaggacaacagaagtggagagagggtactgaaggccagattcatggcagtctgccatatttaatagaattatttgctttgagctgtgtgttctcagctgggtcaatgcacctttggaaagagattttgctccaatttttctcccaagcctgtgtgttcagcacttgcccggggggtgggggtggggggcagtcagtatatagcagacagaaggtgaaggtttgagctgcagacgtccagaagagatcacatcaagtagacacccgagcatggagctaatgtccctccagcatgggctttgtctctgactctgttctccaccaacagatgaaagatggaaggactcacccacagcaggttagggcctgtgtgaccctcaaagtgcaaattggcaatgcggcatcagctacttgggattgtttctcaaaggtcaagagacaaaccctactcttcacggtgcccagaagggtgctgctggcatgacctggttttcttctcttcctctctccttttctcctcctcctgtccttcttccggtccacatttgcttcctgtgatttgccgagccttatgggtgagttccacaggatgaatagacaggtaggggtaggttgagtccctacctttaattgtattagcttcaagaagtcagggccccattttccttccaggcatgtgggtggctgtaacttgccatagtttctaggaatatccatcctgtggcaatgtattcccatttgaaagaaacatgtttaaagtagggcatagggtgttaaggaggagttaggtgcctgtctctgagattaggaaagaatttcccatttcctacaaacagcaactttgagaattcctacatatatactgttaacttttgcttccaatgttcatagcctgcagcttcaaaggagttaggatatctatgactctaagtctggcctcatctatgcctagagaaagcatcagatttctaagtcttctctttcgtgtgtgtcctcaacttctccctagttcctctgtcccttgccttccctgccccctgcccctctgccccaacctcaggataatccatcatcggtatcccactgggtgtttacagagcactccacagccattgttggacattttctctcttgtttgcaaaatgctttgcagctattattacaagactatcctctcagagtctatctcatctcagagggagatgctgacccactctctagggtcaattcccactgccccgccccccagtgggaggaccaaacctgtactggggaggggtgggagtgttaggcaggctgtcacaggctggagccacggctgagccctcaacttgccctctgggaaggtacaccctgcactttatggggtaaagagtaagaagtactgacttgtggatcgtagctggggcacccattctcccccagagtaagtactaagtagcagagatgggctgcattcttccagttcctcagctcagagggaagggggatttatttctgtgtcctacataagagcataaaaagctcccccaacccaggtggtgcttgcttgggaatcatatttcttctctttcaaaatgagaattttaaaaagaagttatgatgtcatagagcagcgctttcctgaaaagagaagcccccacaattagtcccagcaaagctgctttctggccgcctctgttgccaccatgctgcagggcaccttgcatgttctgtttctcattttgcaagtcagagtcagcatcttgcacctccattacatcgcctttgtattaatcacttgaggtttccctataggggctggagagacatcacagtgagtaagagcactttgttgctcttgcagagtaacagggttcggttcccagaatccacacggtagctcccaaccatcagtaactctagttccagggggtttgatgccttttcatctttgcaggtactaggcacacacatggtacatatacattcatgtaggcaaagtgcttatacacacaaaacaagtcttttttaaaaaataaaatacccatgtaacatttcaccgaagtggttgggtagtaagattttgtggtggactccatacacaggcatgcctggctagacgtcttgaggaaacatggtctttgcttcctgccctgccccctcctttggctgctgagtggcactaacaggtctatctgggtgggacttccacaattcctatcctaggccaacggtatctgccacgaagtccacagccagttgacagttctgaaaatggaatgagtcatcttgtcgctcactattgattctcagggccagtctgttaaccccgaccactagcattctgagacctaggcaccctcttagctcctgtggcatctgtcagcttgtttaaatcacagatgtttgctaaatgtgtctgggtgatgaatgcatattcatcaatgtccaatgacttcacctgggtaggaaaaccactgttagaaggcactgcctggtctttgaggtgcactcgcagggggttcctcaagtcagcctttgtgttgagttctcagagcagggatggatgagtaggcaccagagaggacacatctatggactccgctaatttcctttgatatgcatgtacaggaatgggcaaagtgtgagggagcgcgggaaagcgggatctcccttctcacaaacagcagtggatcacaaggggtttttaccctagagttgaaatgaaccagagggggaaagaaactggcatgagcatctttaaagggagagtatggagttgaacctattagagaaacattgtggtcttggttacatttagagactgtagtgccatctagtgttcatggcgaacaaaagcctactgctaactccctctcagccctgctggcttctggctctgggaactcctgacctttctactgttctcaggagagggcttgagaggaaagagccaggctgacaggctgcagatgacaagctgctggtgctggtgctggtggtggcccagtagagagcaggccatgggcaagagtcacctctagaggcaggtgaccttgatgaaaggccttcagtgtgacacaggtgtaaaaatagcctctgtgctgacttaactccctggcttgagcaaacggcccctcacacctgtatattgtttgcttggcatagacacactgctacctgtttgcaggtgtaaatgactgtttatgtacccagagttatgaggagggtgccctatccgtttccagccaacgttctcttagtacggattactgaacagcagagctggcaaaccccagacctggggctaaaggagggaaggacctttaaggggtccacttttaaggggtaccactggctttcccggagaactcagcattgcctttggtatcaggaaaggggtaatatggagaccaaggtggctatgcttagggacaaaaaaaaaaaaaaaaaagtagatggcatgagtcagagagaattctggaagcttttaactaggcttaatataggtcaaagggaatgagaaaaccaaccctacctctctcacttggacaatgagaagggacatgtgggctccgccagttgtagaattctgcagacatggaagataaaggggaaggtttagtgaatggaaggatggcagagggtgacagccttcttctggtggagggctgacacttacatttgattgactctaaggcactaaggattttggtctgtgtctttattatatgctccatataccaagaaaagggcaaacaataatatcagatcatgcatatggttacaatgggatcctagtttcatttctgttgctgtgataaaataccctgacaaaaagaaacagaagagagaaaggggtttactttacattacaattccaagttacagtcccatcactgtagggagttccaggagcaggagcttgaggtaacagttcccatcacatccaccgtcaagagcagagagaaaagaatgtgtgcatccatgcttgcttgcttgcttgcattccttttctctactcttgcacagttcaggactccttgcatagggaatggtgctgcctacactgggctgggtctttccacatcaattagcttaagacaatcttccatatgcatgctcacagccaatcccatgtagactcattgagactctcattgagactctcttctgaggtaattcagttcgcaatagttctgtgtcaagttgacagttaaagctaactgtcacatgtgggaaaactaagaacgactcatttaagaatgtaaacaaaactctagtctccctgacctagacaatctccttctagaatagaattcagagtaataagcagaaactcatagatttacatacaaagagacccatatttacaaaacaaatgccagaaactaggcagggattaagcagctattgaagagcagaagcgaaaggtgaggaaacatttcaatgatggacaattacagtgtgatgggaggagtttataatacacttccaatgtggtaacacattagggcagtaagcaaacatagcaaagcaagataggcttgaccatatcagcttgacctcaactaggcaaaaacatgtgtcaacactggaagtcttacaaaggacagaataaaacgacacacccacaactctgctagtgacctgtactttctttatatgtttcagtattaattctcctacagtgtaaatacctctacattccatcacacacactccaaaggaacaataatcagcatgagttacttttgcaattactaggaccacgagagctagggaaaaaaattgcttaacagataacagagttattctagcttatgatttcatagggatttggttccctgtggcaaaggaatcatggaggagtgggtagggctgtcagtatactgtggaggttttagagtaccacagaccagaaagcagggagagcacatgaggagcaagggtcccagtgtaaccttgagcttctgccagccgggctccacctcctagctgggttccacagcctcccaaaatagagccaccagctggggaccaggtgtccaaaacagaaggctgtgaggacagttcatgatcaaatcatcacatggccatacttttgaaaaggaaaatgaagaaaagagtctgagtaggttaggtggatactataaagatgtctagaggcaagacatgaactcaaaagggtcccctagaacctgagcagctgatgactcttatcttaaacagccctggatggcagagagtggaacccactggccattcgggcctaagtgaggaagaatcagtctcccgggagacatcctgccctgctttctaggtgaaaggtctctgagcaaaacaaaccatttgtgtcttttctcctgtgtcctcccccagtagatatgtttgatgacttctcagaaggcagagagtgtgtcaattgtggggccatgtccaccccactctggaggcgagatgggacgggacactacctgtgcaatgcctgtggcctctatcacaagatgaacggcatcaaccggcccctcattaagcctcagcgccgcctggtaagtgagcatctctatagcttaggtccgccagcctggagagcagtcaggttctcccctcctccctgaacttggctttgaggcttgaaggatataagctgaggggttaggtatgtgggaggaaggaaggagcctctcacactcttagagtgaacttgcactcgctccaaagatgctggcccagctaatctatcacaatgcaatagaggaaagtgaagctcaaaaaggtgactggcaacagacactggccatgagaagccagacccaggtctcctggactccaggccctttgtctcgaaagccaacgtaaaccaggatctgtcttattttcagttgatcccctagcacgacccagagtccaagaaggtaaagcagtaggtgtgagtcctggttgggaaggcctagaactggggccaggtatttgccacctggatctctgcgctctctctctctctctctctctctctctctctctctctctctctctctctctctctctggtgccatctgactctgactaataccaaccctggtgtatggcagggaaggggaatagagagctacattctgaagcttcctcattgaagcccatcaaactcctcaccctaaacaccccaaacgtcaggccctggaattcatgaattccaccttggggaagaattttttctgttgaccgaggctcccatctgtttctatgaattgtctagatacccagagatagtgctaaggctagcccaggggctcccaagggactatcctggcctagccctgctaaacacaaaacacttcctttctatgttgtagtccgcttcccgccgggtaggcctctcctgtgccaactgccagactaccaccaccacgctgtggcgtcgtaatgccgagggtgagcctgtatgtaatgcctgcggcctctacatgaagctccatggggtgagtggatgccctgccctgctgtgtctatgccccacctccctcatgccctcagctctgcctgagaggagcattctccactcccattctgcaggtctcactgctcttccctccagaatagaatccacttgctccttcttttaaaaaccttcatttatttgtgtgtgtgtgtgtgtgtgtgtgtgtgtgtgtgtgtgtgtgtgtgtgaatactataacagactcacaactggaaatccatatttaattccaacccttcaggttcccaggcctcttgcaatgcggaaggaggggattcaaaccagaaaacggaagcccaagaacctgaataaatctaagacgccagcaggtgaggaatagatctgtgtgtaagcatggaacaagtcagaagttcccagagcatctgagaaccatgtctgctctggtaggcggccaccctcggcagccaaggtacgatgctaaccccctcagttctctcagagcacagtaataacccagtaaagaagtcagcacaaggaaaccctatgacgactgcccttgcaataggctggttcaatcagtgtggggccggagagagaaattttgctcagtggtccatttttcaagctttaatcaaagcagacaagttcccattagccgtgctcctgacagactgatctataatcggggtacatgtgtatcacatggtgctctgaacttgtacaagttccttcagggatcctctcaagaccccacagaagcagtgtcatcctatcttcctgagaagcaaactgaaagtcaagtgcaatggcctaaaatcacattgctattgactgggatctggaatgttcactccgggatcaatagtctagtcaatataccgttctgttgtcacagtctctatgtagctcaggatagccttgaactcacagcccctcctgcctcagcctcctaaagtattaggattataggcatgcgccaccacgcctggcagtgccttcttaatttctagatcaagaaagtcactaatgtcccctacccagagccctctctgctgcacactgccaaattacagtttgccgggcttcagttgcagaggaactgaactggctactaagatggacagttcacttctcactgcagacagacagactcaccaagttgcccattgatactaccaaaggcatggccatcattccggtttcctaaattcagctggagctgctgggagacgtatttcctacctgaacctcctcccccacctcccccacccccagggtcctgcctctttctgcctcccagactgtgactacagcagagcccctgggtaacctccctcatcctgtgtggcaggcacaggaagaacaggcactgggttcagtggagtagccctcaacccctaagtggaaatccagaaaagtaaattccatagcagaatctgttctggagagcacagggcatttttaatctcgactcatcccaagcagtgtggctatccacacttcactacagagaaattaacacagttaattatgagttggcgtcccagaaccctctggcagtatcctgcaatatatagtatttgcatttaagaagcagtatcaagagtgtagaatcccaaaatacaacgtggtctccaggatcgcctctcctggatctagggtcgtgagggaatcagagacttttgaaaaggttcccttgaggctggtgatgcagctcggtgggtagggtgcttacttagcatgcacaaagtcctggcttcagcccccagcattccataaaccgggcatggcggcagaggcttgtaaacccagcccttgggaggcggaggcaggaatgtcagttcagtggcatccttacctacacagtgagtttgtgaccagcctgggctgcagcggtttttacaagaaggtaaaatggtctccttgggattttgatgcttctgccctattttgagaactgctccaccccccaacccagcaagtataaaaaaggcctctgtccctgtagctggactgggtctcctgactctgcctcctcctttgcaggtcctgctggtgagaccctccctccctccagtggtgcctccagcggtaactccagcaatgccactagcagcagcagcagcagtgaagagatgcgccccatcaagacagagcccgggctgtcatctcactatgggcacagcagctccatgtcccaggtgggcagggggacggagttgatcccagtagccagtcttgccttgggaaatgagctgtagactggccctaagctattggcctccaagcagcccagcctctgagcccttggtacctcttgtccagctccactgatttagacacaaagaatatcacaggcttaaggtttagcgccttcctgtgctgggtggggcctttgggaacaaggagaaggactcagggactgcacccggggtgcatgtggcagatagtacaactgctccctgagtcagtcttgagtgttggggttggaagcagatttggactctagagcttgcagagctttgagcctagccttgaaggattttcagaggaggaggcaggaagacggtgtgagcatgtcatagacttgggaaccacagagggtgggaagctgttttcatgagctctaggttcccgagagcctccgagtggccctacaagggaccgtgccctcttgcaggtctgatggcacctctgttcctctgccttttaggggatgaggaagtcacaggttccctttcccagcactgccacccaatggttgagaattctaccatcagagtaaactagagagaacctggctccacagaagtgagagtgctagaaccctttcaggtggagcgggtgacctcagttggacccagaagacctctatctgaccagggagtggtgataagagtgtctcctgtggctgccagagctttctgagaaagcacagcagcacaaaactcctgggttgtacctctggttacagtgctcagaagccaacgtggaagcacacagaccctctgcggctggaccctagggcctagggaagcagctagtcttactccctcattccctccccaaccctggtcctcggatctccaggagcatcctatggctcactgtgctctctgccttccagacattcagtactgtgtccggccacgggccctccatccatccagtgctgtctgctctgaagctgtccccacaaggctatgcatctcctgtcactcagacatcgcaggccagctccaagcaggactcttggaacagcctggtcctggctgacagtcatggggacataatcaccgcgtaatcagcgcccccccttccctcttcaaattcctgctcggacttgggacgtgggggccagcaaagtaaaaggctggggcacccttggccagcccctttgtctgggaacaactcctgaagaacaactgggtagaacttgaagttgttgacaatcacttagggatatgggtgttccgggttgttcaaacacctttccaggtggagcactggaaaagcctgcgttcttacagagaagcccaccttggctgcaagcacagcacagtgaggcaagagacttcttccttccttattctccacctgcctgtccaggacagacacataatctccttcaccccagctccccacccagttgtggtggtgggtttttctttgtgatcctagagtggctgtaggggcggaggcttcaagacaccatctacagtctgagcagggtgtctacttgttgtagactagacatagaagccctgcccttgtccaacactccccttgcttgaggcatggcacatctctgcatgtcccataccagatctgactccaaagtgctgggttcaatgcagatgttactgaatgcttcctggggagattaggtgaggggaaggcacatcacccatcacacagaatagcttcatcaaatcgcagcctggccatggtgccttcccttcctctcccaggaacatcaaaccccttgctctccagcctgaacatctaccctctgcaaaagtagagcccagttgtgcagctaatgccactaggtgctatatcccagcatccttttcaccccttcacacacaggggttccaaggaggaacaaaacctgctaccaaagcagccttggtgactatggctcatctgcacctcagggggtgggggagggccctctggaggttgtgtctacagcacaatactgttcccaggactctagcttgcttgccccgagcctgccaagccaagccctcttaagtcagacagttacctggctctgggactttctccagcacagatcctttgtctagaaaatacagactgtttgcaaaataaattcaaagcagaaacaactaaaggaaatttgtgaaaggacaaaggtgatagacgggagaagatgtccccagggctggcgggacagtcatgatagcagctgtcctaggattggcctccctcccatctcccaccattactggggctcccagagattcttccttgtcctcatcacccacagagctgtagccaactgtggcattactttattttacccaaaattcccagccccacccctaaaccttactggccgtagcagagaatagcttcgaaccaagattctgttgtaatcattttcgctgtttctccctcaaggccgccttccccatgcctgcccctcctccacaacccgttaacattgtcttaaggtgaaatggctgtaaaatcagtatttaactaataaatttatctgtattcctgtttcctccg

SEQ ID NO: 75 - DNA, 62954 bp, Homo sapiens
  source 1..62954: mol_type = genomic DNA
ataaaaccggtcggtgatgccgggtggatgggaacaaacttcagaaggaggagagacaccgggcccagggcaccctcgcgggcggacccaagcagtgagggcctgcagccggccggccaggtatgtcacccaggggttagctggaagctggctagcagtgaggacgggggatggaagaaaggagagggtcccaggatgcctggcagccttttccctcccaagttaaacgggataagactgggacagcggagggagtgggcacggaggttggagtctggagcttcttcagcgcactcccaatccttgatcctcccgggaagcctgttagctaggctaggctgaggttggccctacttcgcctaaaaatcctcctactcctggcagacgatgcaggtgtaaaggatgaggcctggggagggggcctgaggatgcaggcatcgaatctcatcgcatctcatgcccttctcctgggtttgtgcagggcagcggcaggcgcggcccggacctacgggaggaagccccgagccctcggcgggctgcgagcgactccccggcgatgcctcacaactccatcagatctggtaagaacgcggtgtggtcaggatccccgagcccccgcgccgctgagcgtccgtgcgtgcgctcgggtggttggatctcgagagcgtcagcacgggattcgcgggacccacccgcgtggggacccagctggggcgcctggggcctggccctccgctggagccgcctcgctgttctcgggcactggggttccacccggccagctgagccgcccttgcccggtttcgagggaccacatggatcggtgaggggatctctgtggagttagagggggtttcctttgagctccattcccagccttgcatggcgcattagtgtggacattcttcgtgctctgtccctgggctgcaccggtgctggacttgccgtttccccgtccccgacctctaagtcctcttcctcgggtgcgcgcagtccttcccagtgactcccctggctggactgtgagctccccgcatctctcaagccaacggcaatggagccggtggtcccgggcccgggagccggcagcgcactcaggtgctctccgactcctcctggcccagcaccgggcaggccgggcgccgcgcgcggggcgtccggctggtgaggactaagccgctcgcggagtcaaaaccccctccccacctgcgcccggaagcagggccttcaaacacactcgagctcccaggccgcgatgcctgttttcccccttcccggccagggctgggcagggtctttgctgggaaggagctccagggtcagggctggtgggcgcagccgtcccggcgcgcagcgagtgcggacagcggtggaggcgcagcgcggcccgcagtgatggatggagcccggccggccgcagagaaggcgatttatggggccagggcgcatcgctatcgatttgggccggcgaagtgagaggaaatcaatatttcagaatgaattctccgcgaatatgatgtcccgctctgcaaacgggacatttgttataataaggagggtcggatcgggcgcgcagcgaggctgagatctctatttagccaagcgcactgcgggggcccgggctctgcggcgcagtctccagtcccagggccatggcccaactaggaggggagcgggaaccccctggggcgccggaagatttctcactcgggttctctctagagctgcagacgaatgctccctcccggcccccattcccctcagagacctgggccagaatcgtccggctgcccccagaaggcgcggggtcccttcaaggtcctcaggggagagacctcgcagccattccccggcgcggcggggttggggagccctgggaccgagcagagctccctggcacctctttacggtccgcgtcctggaaccacgagcgctcctaggccactatctaaggtcaggatcaggttttagtcccttaatctttagccaaaccgtggtacgataccagacatcgccaggaccatccctgaggcctaatgtgcagtgcccggtgcccatgccaagctggtgcaatggcacttctgcgccaagctggtgcaatggcacttctgctcggctctggaggtccatctttcctcctaaccttcccctgacccttccggcggtggcaggaggagtgagtgctctcggaaatcaaattcactgtggccgggctggacccttactctctgccgctgcccaagaaatgagacgatgtccccgtccctcagatgagctttttttttttttcgcggctacttattttcattctagaagtactcgttagaatagatggaaatagagtatggaaagaataaataaaggcacaatttatttttactgtagttttaatcaggaacagtcccagatgatgagatgcgcgctttcccactagcttggatgcaaatcgcgcttgggttttgggagggagccctctgcccctggacctaccaggtaatttttttcccctttcttcttttcgggaagacagaggggcttcttctaccctctttccaaaacaaatagacaaagtggcgagggagggaagatgagactttcttctcatagtttaatttaaacgctaataaaacaagaaaatggcctataaccgcatagactgctgaaggcgctccctgtttcttttctgaaccctccctcggcaaacctgagggagaggccgtctgtctttctgatcagcttacctgacactgttgtctataaccggagctaaactcataagcggacccctctggtttttacaagcccattatctctcgggttttagcaggttcccccttttccccaggcacctctgttcctgagaccggccgtgcttagggagctccccttgagttttctgtgagcagagcccgggacgcaggcggccacacggctttccgcgggagcgaggccgagcgcacccttcccaataaccggggacgctcgagaaaacctccccgcgcggcctccgccgcccagcctgccacggggtcgcctcgtcgttggctggtcttgccttgcagagagtcttaacgttgtctttcctacagctttattctgcaggaatgttgaacgcgaatcattttaacgtgcgcaggtcagcgatgggctgaacgttccttaaaatcgctatttttgttgcatcagggacgaaattctctaaagcaaaaacatttttaaaaaaattcaaagatgcagaagaaacgataaatgccccatatatataaaagtgaaaacaatactgtaccaatgaggaagagagttttgtaaaagcaagcaggctggctgtcattaaaagttatcttaaataacttgtcgcagcccactcccaccagtcccgaaaatagttcattcaagtggtaaaataagacaaggcagaggacgatgtctctaacttccctgatgtgagatctaaagccccattcctaactcttggttttagaattgaggaaagtggaataaatgcatttggaaaggatctgttttcttcccaggtttcctgcctgggttgaaaataaggtttcaggggatggaagcaactttgaggaacataaagaggtattggggttcatcaattcatctttgtttcaagatggttcccccccaccctccacaatgcaagttaattaggagataatttagctaccttgtgaattagttttaagataagtatctttttaagctttgtcactttaattgccccactgattgataagaagtaattatttctaattgacacttttttgatgtctattggaagcatttatttggaactttttgggggtggaaggaaagttaattaattttatcagtctacccccaaaaggactctgcctaattttgttgaagaagacaaaggaagtgaaggaaaccaaataaaaaatcaatctcatggaattttaattactaagggacactttggtttaaattagagggcatctactaatataatatgtcaaaacgttctatttatggcctcaaatctctaatttattgagatgcattttataggtattcattttcctatggatacactcaacggccctttatatgcttccttcattttggagcaggttcctctgctgtgtaaataatttttgtgaaaagtaaaatctgtcaaacttggtatgcccagaaaaaatgaaatcatttttgtaagagccaattgtaagaaagatttactaatagtcatccttgttctgtaattattgatggagttgggtataaaggtgaaactttacttacagtgacttgccttttcatacctaaaccttggagtaaacagtttaatcattcacatcctccagaacattttgctgtgagagagaaaggagtgaaagaataaggagaaaaagaaagacactgaaaggaggcaatgggggtggaaaggaaagaaagggagaaggtagctggagagaataaaatgaaagcattcatttcagaaatgaagatagccaggtgcatggaacctttgccattcaatataagaaaattgaaatcctgctttcaaaatacatttttgttaacaccaaatctctaccacagtctctaagcaacccctaaccaccaagggatacccccagttttctaccccttaaaaaaaaagaggagaattttaggaagctggctgatccggatcttggatatctggctgtcaaagtctttatctggggtccatgaaaaggaagtaagaaaacgcacattgtgctctgggatttataaagagattcgagtgttgtttatgtttattttattattaaagcccctgtgatcttcatctccattttgtatgcacaatcttttcacagatcgacttgtgacttattgatataggaaagcattcccacattaacccaaagtagagacacacacacacgcacacacacgcacgtctggaatgagagaaacacaatcacacaggacgcgttcctgtcaggttaatttcagccagtgcctttttcaaccatttattgtaaaatcttgcctgcttttattgatgtttctccctgattatgtggagctgcaagaatgaggaaatattttaaatgaaaaataaatttaagacgtacaaacatcagataatatcacataccaacctcactattagtgaaattgaaagagtatataaataatgcaaaaaaaaatcagcaagggagagtttagtaatggaaaattccctgcaattaaatgaaacagtaatttagtgaagatatgcctcaatgaattagcatttattaattggttctcataaaaacaatttgtgtgtgtgacttggggagggggatgtttaaagtatatattgtccagagataaagttcctcaaatattcatatcaaattatgtcgttatcacattctattttgtgagaaatcccaagtctctcactggcaagttacacctgtacacagagagcttgaatgcaaaggaaaggattcccatctagatcaaagagtaaagctggttcccacttctcttggtacatttccaaatgtgaaacgaatgagggacacactggcagagtcttctatgcttaggaacatccaaaccgggccgcaagaagactccctgaggacccagctcttctggggcacagctagctaagccagagctaagccagggctggtttgtggttctggtcccccagcctgctccagcatcctctccggctcaggcaggaactgcagtttgtaatctcagcgaggagcttgctagggttgactggtgcatggatgtgtttactttctctcgccacagttggtctgtcttcagttctaagcattttaaagctgctctatttatcagtccaagaagtgctgagttctccgttgagctgagaagctttgagctctatggttctgagtacacgagaagccaaaagataaaagaaactgtttcatttaagaaaaaaaatgttttaaaaagtgggggcaggggaatgaatgagcccaccttcaagactgcagattagttttgcttttgttttagttgaaaacttggtgcactgccccccttcgggtcctcattctcttcagagatagaatttagtattgaaaacaccctctaagagaggagaatatgccctcacgttatcttctcttagagggtgtagagttctttgcgggagggattctttccaaatgcagattggaacaccttcttcgcccaggttcttctggggagggagctaacacattctgcctaggaaatgcaggcaatgactactttcagcaggagttctagacattcctttcgtggggaaggagtacagagcatgacaatccaggagtctcttggctcctgaaaactccactctgccacaccaatcctagttcatccagtcagtggtcagtgaccctgggatggatggaatctctgcagtgaggtggagtaggaagaagcatccactcgtctttgtttatctacagtaatgacacttttaaatggatcttgaggattcataattatttccttaggtccagagttagggctgacaagactgtttgggttgctgaaagcccctctagaccccttcgttggccagatagaaatacaatgagcaaatttctcttatataagccactggccagaaaaatattcataggaaggcttctgtcttaaacctgtaattcatgtaactgagtctgggctttaccttgcttggctggtgggggtccttccccaggaatgagtctcgatagaaaccagcatctgtttactgaggcatgtctaagatcaaggggaagaaagtccaagagtccccgaaggatacttgggttctgtttctgtgtttcttcccgtggaccctccatagtcctgaatgccatataagatgccagcaatccctgtggctcagccaagccagcctcacagctcctcctgctctgcccatgtcacatttacatccaaagaaaaagaacgtctgcacaagagctgagcatacctggcacttagtgagctctcaatgaatgaaagctgtgattcttctctctgaggactgccacaggtgtggtgtggtgctgagagcagatgtattcatcatctcatttaattctcacaactctgccaggcaggtattgctacgacatttttatagaagagaggggaaggaactggtgttcaaagaggttgataagactccaattcccctttccactgctccctacctcaaccacccaaagtccagctcatcagaactcggctactagatgatcgacacctggaatcctagtggaaactcccatcagaacccttgataagaaggcccaagtgcccgtgctggcagtgacaggcagagccttccgtctatcagcttgctttcctcatcagtgttccccactctccagtttaattaaaatacacccctttccagtatggttctcagtcttcccatctgtgaaatggagaagtggttcctgcctggatgcctctcctagaagtagctatgagaaggaaggagatgatcagccacttggaaaggcagagggagggaggccttactttcacacatccccccaaggctgccgtgtctccatctgcactggaaaaaaagcagctatcctcaggcaccacaagttgaaggaccctggggaacttacttccctaacttggcatctcccaagcacactcagcctccctgcctaggttcatcttggatgtgatgcgaacagcttcagagtggctggggaggcttccccatgctgttaggggccagcactgggggccccatccacaggcagcatagctaggagtggtggccactggaggtgccggttgttatgtcccaaagcttaggttcatcccctctgccacttcctcaggatccctctcactcaggggcttaaaagcaaggcatttctcttttggagcctctgcagaggttcagttttagaacgttagcttgaaagaaagggattttattttaatgttttcactttttcatgtagaaagtagctgcttagctcccgggctctcagatgaaaacctctctttggtttaagcagagggagagattgagaaagaaaaaataattcattcctccctgcttttaactttttttcgtcatcttcagccacaatactcattggttttgtcttttttatttgtcttcttaaatggccttggggtgacatgggtagttagtgctaattagtccactaggacatattgtgactgtcagggcagcacagcagaagggtccaggagctggttgggtgacgcacctaagagagaaatggcttaatctgctgtcatcggtgtgtactacagtgttcgcgcacacccaggccctctgtgtgttgcagttttgattcttcggcatctccaggaggacagtagaacttattattcttgggataaactcaggggccatgaggtgtcaagagaatgagaggcttttgaaatcagcgtgaagccaggatgaaagcccctgccctgcaggcagaagaagaaggcaaagcccgggcttccatcttggcccagaccttgctgtttttgtgtgaacttagtcaagtcagatgtctctctgggcttgtacttcccctttataaaatatggggatgctgcagggcttctggggagtcatgtgagtaaaacctgtctcctcacctggcacatagctgccactcaagacaattttctgtgctccatgtagtagtcaccaaggagtggagtctccagaacacattcccaaagtcccattgtcgtagtatttcctgtgaaacagccaccagtaacttgcaacccagtacttcgttccatttaaaatttaggacagacttttcaataattcatgtggacaaaataatagatctaccacctaggagtactgggattaaatgaagggacgcatagaaagtgctggctatgacctctgcggctgttatctgctgttaccacagcctgaaatggaaaaggatgccttagttcaccttaccagaaaacccagtcatagggaaaacactaagcttttgatagaatggctgtctgtggactgtgtgttgaaatccagaacattctaagggtttaatagagttggtctttgagcaaaaatgagctcaagtgggtttgcagttatgctgtgtgtgcggctaagacaggactgcaggaagacttgcctggggtacttgtttttaattgacacggaatcatatatttatttttaaaaaattaaatccacgtatcctccaccttctgctttcttctctctccctccctccccacctgcctctgtctcacaattttctactttgggtaataataatccagctttggcctgatagcaaaccctggttgacatttaaaagtctctgtgattagctgagcaccaaatctctgacttaagctttgctttgctcctttgcttcaacactgagcaaggtagaaggcacctctacagggcagggagctggagtcttgctcttccctttcaagaaggcagacccgcagaaccaggaggaagaatgatcagacaaaacaactcagtggtaggaaaaggactgaacactaacaacccattcggcaggagcaccaaagttcatttttcttgaacagtcaccccagcacaactatgttgtggctgttgacaggtaaaccccatctggctttctccagtctgctcctcattgttccagagccagtgtgctccatgacggtctacactggggctccatctcagggctgctggacagtttgtggcaaaatgtggcagggctgtaggtagaagtgccatggagatacttctgccaaatgaaaatgcttactggacacttccaatgcctaggctccatgccttcacagatatgcaaactttcccctctgtaggccttacatctctttggcagtatgaaaagacctgggtccttcgagccttggggaccttcctgggccccccatattccctggggacatggcagtaccccataccaggaaggtccccatggcccatggcccacccccactgctggccatggggctgtctagacaggtgccccacactgtgacaggcctgcctgggcctcagggctcccccttttgcaggtggcacctgctttcaagggtcctgcttacagtgacatagctgctgtcctgagactctcctttcctcagggcctggctgggggccatgccatgtctgcaaagcacttggtcacgtgctgcccacattccagctgtcctcacccatcccagctccaaagccacctccccatgaagctgtccatgattcctcttcctcttccccacctccccaaggtctcctagcactctgtttgtacggcatgccttgcagtccaatttttggagaaggcttgatctctgtggctcgcagcttccagacttgagttacttgagtacctgggacaatgtatgcctcgcacatctcagaagcttcataggctttcattatgctggtctacctggatccagagttgttcaaggctagagggggctcacagatgagattctgttgccacatcttaccagtgaggaaactgagacccagagaggtatgccccgaccctggtcccacagcccttgtggcagagcagacactccatctcatcaccaggactctttccatgaccctgtggtgacttccagggcatgttgagttagagtgagggctgacccaacccagggagcctttgctgtggcctgtgctgcataagcaggacccaaggaaatgaaggggcctccttcgcctgctgacagggactgggaagcccagtgacagctgctgagacatacagacacacacccatgcacactcacatgcatgcacacacatacacagcatatgtacaacactcacatccaaacatacagacaaccggggggattagggtgaagcaggaaggcactcaaggtgcaaaattccaggaggctctctctctcaggctcacgcaagggcagggttggccctgagagcaagtgcctccttagatcttatagcctggacacctggctgtcctcattctagtcccctgtatccatatgacacacacagtcatacccagttacacacacagaccacagtactcacagacatatacatgcacacatgaatacaatattccccatctcacacacataaacatactaaaagtaagcctttaaaatgtagaagtatgtgcagaagactgtcctaggtctgtgggtaatttaaaaagaccagagaaggccctgctttcagagaccctgagaaatgcagctgggaagttacaggtgtgattgatgagtcccggctgtactcacagttgctagaaaggaagtcataatcgatgcactggggaaagtagggtgtaagctatccaggaatctgctctgtgctatgcatctatttaggcatgaggtcactgacatgtgacctccctgttcttgcaacctgtggtttaaggtctgagtagaggaataccagtgtccaaccatgagcccctcctggccactagctcctcactgaagttacgggtcatgggtagtcatggagccctgtagagaccttttggtccagcattcttgttttcacataagatccaggggcagccagtcatttgcctgcatcagcccctagcaccactaggtctctggggttcacagtggctcttcccagatgaggacagagctaccaagtgggcagcagcagtagcggcaggactcatccactcaagaactggcctcaaggtcccccaagaatgaagcactgaaggcaggtggctgccagctagcatgggcaggcctctctgctcagctcaggatattctctctaacattctgtccttgctcagaattcctgggccactctgcgcctgagacccctcagccccaggcagttcaggcatgttctgtctactacactctaaaggagaagtgtgaacacaaaccacagccgcatgcacaacaccgagcttgtttctccacccacatagactgtatttgtcactattatacacaatatggtgccatcatgcatattttgtacatttgatcaaccaatatttatataaaactttcataaacactttcaaacagttttaccccacagggtgggcagaggtgcttgtcaatataataaaactgaacaacagtggtagaaaaaggtacacttgtacttatcttcaagtttaagatgtaaattttttctgttcaatggccactacctcatattatttttaggatctgggatcggacttagcaacacattatgactttcaagaagttgagctcactgttttgtggcgttctttgcagaacaccatgaacttccgggtgccccatgtgctgacaagtgtcagaacagctggtgtccagctgacgtgaggctggacttgtgtgataggcacgttgtggccatagctccccactctgtgaaatgatgagatcgacatgcctccatccatcagtaggatccccagcatggagaatttacaccgtcacccttcaaagaaaggagccaagtcctgggcacctcctctcaccttgactttcctacaaaacacccttctttcttggcaccagtatagcacatgtgtattggtcatttaggagcccaggtgccttgtggcagagtaaagacacacacagaaaggctggtcttttcttactcagcatccctggagcacacccagaacatgatgccttccttgagatttcctttaaagaccctgtcacccctgaggtttccatcccagctacctacagaagtcgtgatttcttttgtctttctctcagcttcacagacttcttggtccaccatggggagggcttctattcccagtcatccactgtcctgtggtgaacctctctcctctcctcctggcccatttctctcccaagtgtgtgctcagtctgcaccatgtggccagatcatcttaggttttgatccagctcctaaagaagcactcactgccccttcactctctcactctgacttcccagcacttgggttttgctgcctctgtgtctggagtgctccatgcaaatttctcaccccaaccactggcatgctcagttacctttagtttttatgatgtgtcctcacccatcctctggccacacaaggctcaagatctaactccaaattatttcaaagagcattattactcaactattcaatttagtaagtcaatgtctactaagcccctcagtgtggcaggcagggagttaggctttggggttatggaactcaggagaccatgcctctgccttcgtgctgacattctagagataggaaagcaaactgaactttcaccataatcacagagagaaagcaaaggcttcagtctagatagacacaaaatgctgagcaagtaggagagggaggcatggtgagctctgaccgggtcagggtgggattccttaaggtggctcagaggagaaaccagccccagcagagatgcagagtcccaggagggtgtgcaggttccaggcaccagcagtcagccctgagggaaggagacagcaatgggaacatggtcagggttcagcccaactgcaggggttgacaagagaagctaagctatggtgttaattccaatgtgccatcagaacgtctgggtaaagtgcactcgatgtatacgttttagggcattttattcacttgtgcatgaaacttccatcctcccctggcttggcctcacgcttctgttgttggcagttttcatatccttcttggctctcttgccacagctgcatacctactgacgctgttgtcttcaggttttgcggtgattttattaagtggaaaagccatggcaataatctgtgatagctaggttattcactttttcaaaatgttctggtttctctcctctcttggctctgtttcagacaaacttaacctggtgattttccaaaataatcagatttctccttgcacttccttttaatccaatcattaacaagccattttcaggcaaactgctgatgtacaatccgagaagactttctcctacctccgtggcctatttcccactatttccgtatgcaaacccatgttccagccagctagtcattgtttccaaaatacaccatgtacattctcacctctgtgtctctgcccattcaatgcagctacctggaacacccttcccactcccactcccttgacaaagcctcagtcaagctccacctccttcccaagacctttttagacaccctttacctttagtgaccatcctgtctgacttcccactgcacctgctccactccctgggtactcagtacttgttccaacaaatgtcacttagcttcttacagtgacaacctgcctctgagctagaaaagaacaagaacccttccagatctctctctatccccagcaccttacacaaaatcctacataaggagtgaggactctacaaatgtctgggctgctggttttcacctaattctccaataacattttttattgcttccttggttgatgcaacttgcacatttgagttttgtacatgaagtttttccaacatgaaatacacctgatcctttcccatgatattgctatattacttttctattttctttataataattggcaatgagggaactgagaaagcaagaaatgcagcctttgagggaacctgatgcagccattcaggccggagctgccccactgggatacctgcctggtcctagaggcatcttgtaggcacagaagcctatgcttgaaggccagatagccaggttgagcagcaatgggcactgggagtaaaaaacactggcaagcctggggagtttgaaccaacaagggaccttcctagtggatgctgggtgtcgacttggcagggtaattggtcagatttagggtgagagcatctgtgaggataaaagattacaagattcctgtaattcctgcagactgggaatacagctccaaacaatatctagcacatagtagacatatactaagtgcttcacaagtatttgtaaaatggatctttcttttcttcttttttcctctccttcttccttacttccttttttttcttcttctttcttggctttagataactgtttctcaagtgtggtctatatcaaaacctcctgggatttttgttagcaaatatggagccctggaatctgtatccttcacaagctcccagggatttttttatgatcagcatttaagaaacactgatctacagcccacccacagtctttcccatgtggagtccctcatgcctgcctgctgggggcacagcccttctttttgcactgtgcctcctcctcccagagatctcccatctggctatgggtagaagcagatcagatttgaatgcagtctcaggtctgcccctaactggctgtgcacatgccatttgagcctccgagatggcatctttatctataaaatggggcaaagtgccagccccacctacctcatgggattgttgtgaaaactaatcctggatgcaaccaagtccaacaactggtgtttgttgaactaaatttaagaatcacttacttgacagtattttggaagggccctgtggatgtcaggtgagtttataaccaacatttagactggatccagggtcagaaagttcttgaaaggaggagaagcctggaggtcctggtaattggagggaatccagcctggcatttggaatatttgctgtgctgatacactgatgttctttcactgaaaaaaaacaaaacaaaacaaaacaaaacattgccacatgatgcaaggatcacaaatggagaacaagatgatgaacaagatggtagcaagtatagtaatgtcaagagaaacaggttttcaccaaaagagggtaagctattagaaaggattttaccctctacttgactgactgaacctgccttacacttaagagtcatttggagggaactggaggggcagccagttaccctaggagagcagcctccaggggctgcccaagcctgctgtgtgaaattcagggctaaagctctaaaactctgttgatctgtgcatgcgtttgctagcgctgcagtgacaaagtactacaaactggagggcttacataatagaaatttattgtttcacagttctggaagccaaaagtgtcaaatcaaggggtcagaagagttgtttccttctgaggctggaggagaatctgttctgtgcctctctcgtagctcctggtggtttgctagaagtctttggcattccttggcttgtgacagcataactctgatattcatatggctttctcactttatctctgtatccaaatctccccttttcacaaggacttgatcatattggattaggcccaccctaatgacctcaccttaactagatcatctgcaaagaccttgtttccaaggtgctagggtggtgggtggagacaggggagagactattcaattcataacacctaagtattgtgtctccttagtccgtttcagtccccacccagccctgacttgactctcagctgctttgggtctgagcaacaccgctgcagaagctctgatttggagctgacagaaaaagaaggggaaggtgacatccatcctccagaacctttcctattgctccaacagaggaggggactccccctcccaagccagaatcccccaaagagagcctgaagtccaggttcaacacttagaaaaggcgagtcatggtggctcacacctgtaatcccagcactttgggaggctgaggccagaagattgcttgagcccaggagttcaagaccagcctgagcatcatagcaaaatcacctctctacaaaaaataaaaaacacttaagaaaacaaaaaggataagcaaacaagctgatacaagaacctaaaatcggccgggcacagtggctcatgcctgtaattctaacactttgggaggccgaggcaggtggatcacctgaggttgggagttcgagactagcttggccaacatgacgaaaccctgtctgtactaaaaatacaaaaattagctgggcatggtggtgggcggctataatcccagctgcttgggaagctgaaggcaggagaattgcttgaacccgggtggggcggaggttgcagggtttcagtgagccgagatcgcaccacttcactccagcctgagtgaaagagtgaaactctgtctaaaaaaaaaaaaaaacctaaaatctttcagggcatgacttgcttcaggacatgttctgcgcaaacctcactttcttcctccactctaccaacatggccccagccaagaagccactaagctcccaaagggctaagacagggatttaggtcagaacgctgaggttctttcttggttctgccatgaggtgaatctgtgacattagacagctcacctctccttcctggtcaaggatcctctcagaagtgtgccttgcaactctgccactccacagacactgtgcacatccaccttcatagtctgtaagccgtggcagcccactttgttaccatgcaagtcatgtggcagcccataggccccactgtgtgctaccttccctcatcttatggcacgcccagtgtcacccctggtgttttgtcacataggaaggttactcaatgtttccctctagagctctctctgtaccagcttctgggggtttctggcctctgttccccggctgagggcagtcccagagttgtagacattaggactggaaggatcatctgcttctgtcaagccagatgaaaaaactgaggcacagactggcatcgtcacagagtgggcagaacctaggcctcctaattctcagcaccccctgtttcctctccagaaactgcagcctgcaggctgcatctgctggcctctgtcccttccccttttcttctgcagcagtgagggcagcttttagagtggataatctccttcgccatggtgcctgctatcgacaggtgtggaaacaacagatgcacggttttgtcacagattttgctcctgtgtgtccctcagaaaggcggttccccttcatttgttcttacctgttatggtccccaggatggccaggccctccttctgtcccccaccctgaagactctgcaactcacacacacagtcacacacatacacacacacacacacacacaaaacagtcactctctctctctctctaaacgtgccctaattcaggctaaagcccaccctttacaaatgcctcctccatgagctagtcaagcccatcaggttgtatcctagttaagatctcagaagcaaagaatctcggccttcaaaagaaacttagaggtcatttagttcaactgtccgggtgagggaggcatctttatgtgacttcattatattcaatattccctagttcctctggcttctcagtctctgcagtcaccccagctacagctgttatttccttcctattcccccttctccccatcctccctacctacccctactctcatggtttcctgccctcagcaggggttcttctcaccatccctctatttccctccttacccatctctgagtgatttttaaatcagtgcccactaaactcacatttatagtattataactttgagctgtagaacctaccagtactttatgtcctttactatccatccccatccccaacacacacacatactcacacatgagcacacacccccacacccactcattcatacacacattcacacagacacccatatacacacctccacagatattccacggagctacttgtggacagaattgaaggagactgtgcatgtaaatgtgttgaaaatctttaaggttctataatatgtcagggactattaacttgtaagtttctcaagggcaaggactgtcttctactcagaaaccatcaccccacatacacacagcctggaatattattagacacagagtaggtgctcactgaattgaaatctaatgtactgaaaattgctttaatataaacccattaaaaaaaaagcatcagtagccacaggcctctgacctcagggggagttgagggtgtagtgcagtaacttgtacagtcgctaagcatctaaacgcgtgttcggcaggtgctgccatacctgccttgcctgtttccctccccaaacgcagagaccctggaccttccttctgcagcccagagggcccttccacagccctggtgtgcgatgccaggagtctgcaagtgtctaggaagctcagtgggaaggatctgggaagaatgacctctagtaaacctgcagggagcactgggaagctccatttgcagcccctgactagaagttcatgtttcatcaattaatgctttcgataagtgtttgttgacatccacagagtagatataaactctaggctatcaacagaggagatttttaaaaatacagattcagggatgctatgccaaaagattctgactgaactgacctgaggcgggaagtttctggactctccaggtgattccagtgtgcagctgggaggaggaaagcactgctctacccactgcaaagcacgcctgcatggtcagatgaaagctgcacctcccctcaaggagccaggtgtctgcgggaagaacttgacaacgagattcaaagagaggacaggggctggggaggtcggtgggaggatggagaaggttctggaaggttgcttctgggaggcttctctccctgggcttctgaaggccagagtgcagggtgtggattagccatacccaaagccacattcacagagggggaagcatcactcctgcaggaaggaaaggaagtgagtcccctgcttgggaaatggtgcccaatctcagagggagaaagtggctcatctgctgttactttatataccttatattgctgatataatttataggatctaagacagcgtgaagagacctccagaaatctctgagacagcaccaaaggcaaccctacccagggaacccttggacttggtgaccttcaggctcagagcagcccatgtgtgtctcacttgcctcaagctctctggcccctgtgctcccaaggtctccagcttggctccaggaaaaggcagggcctcatgtcaagtagtacttttcttaaggagcttagaggtctattgacatttgaagcagctccatccctaaaaatccacacactgaagcccttcttgggagggaggtgacagggttaatctaagggctgggggaggcggagaaaggccttgaaaccacacagtgaagccaaccagattaatagaggaagagagaggggggtagaccattaggaagacaaagagaaaatcatgctggagcaatagaaagggaaatctaatatcaactagggaaaaataaatggagattagggcaaacaaattagctttaatgggttcaatgctaatacaagaataacagcggagctgcgaatgcctttgaggggaagatgggataaagaacctgagcagtcatgcaagcaataaagattatgcagggaagggggatggccaaaagagccagcagggagggagagagaagggaagactccgggcagatgggtaggggagcggtggcattggaggagtctgccatctttgacaggaaaggactgggacagagagctggtaagaactggggaggcagcaatcaggagggaaataaaagaaagcaaggaaactgggagacactgagggcagggatgcaaacccagagccggaaagactgggaagaaaggaggcagcgatggatgtaaacaaagagaatggaggacaaccagccagtacacaagagtaaagggaaataaaggaattaggtgccctctctgactggagaaaatttaaaaaggaaaaattaggccccaagaaaatgaaaagctggagaggacttggaagtgtgttttggaaagcacccatacttggtaggtgacgaaaggacatattcgctcttagggcggggtctggctattcctggaatacagtgctgctgccaggggtggcgccggaggtgggtgggcaaaagtaagcagtgcagagcattcactatggcatctgagagctctcagcttgagtctcagtaatgccactttgtaaaggtggagccttgaacctgttacatgccgaatctgttcctcatcttctcatcaataaaatgataatgtacttcatttctcaaagggttattataagaattaattgaaaagatgcatttaaaatactcagcttggcccaaaaataagcacctcccataatactggctatgattattattcttaggcattgactaatggggaagaggggctgggtactaaagatagctcttcctccctccttcccccacttcctcttcttttaggtccagcattggtgaaatacgagcctagtttgattctctcccagacagagtctaatccaagggaaacctctttatccatcctctatctccctcccctgtccctccccagctccctctcactattggggatgaaataataatgctaagccttccaccacagccaccctctgggctgatctaaggcagaagcatctaaggaagccaaatatcacattcgattggaagaccctcttatatctgcctgagcctcagagtgtagtagacaaggagctggcgttggtcctcatggcctcacatcttaggatcctcctgggatgcattaaagagcatagacaccccaccagggaaacagagccccaaagaccagcacacagcaacaataacaagctaggagtcaatcggtaacagcctagtcatgggcactagaaggggaaagaaggagctgggattatttcctacccctccaggcatcccagaaccctgcccttttatcattactaaggattttagaagagagagaagagaaatcaatccaggcaagaagaggggcagataggggtgggggatctttgccatttgctaataaataagttaattaacttgaaatcattacaaaaagaatcttcccataaaaccataacctccaagagggcagagacccatctttcttcatccccctatgtccccagaacctggaacagtgcctgttatggaaatggtgggtctcagtggtgagggtaatggctaacatttgtggacggtctactgaagcccaggtcctgtgtcaggtgctgcacgtgcaccatgttatttagatcacttggcacacttagaaggaaagacagaaagaagtgacagaaattcatgccaaagtaataagttagtcagaggtgaagcaggggtttctgactctcttctccatatagctttaaggaatggaaataaatgaatacatgaacctcacccactcatcagggcaagaggacagatttgaaagctacctctcagtttgggtgttattctatatatatatatacacacacacacacacacacacacatatatatatatatacacacacacatatatattccatatatggaatatgtatatatatatagaataatagaatatatgagggactgataaatgggccacccggcaagtagtagaagtttaaaggatagtggaaggactttcttcttgttgttgtatgtggctcttgtcagccaatacctcagcagcagtagttgaatcagattccagctctcagctctcccagagccagcctcacatgcccccagcaatagctgggatgagccagcccttcggagatccaatccccagctccacaggctcttcctctaaacatgtagctctgataactccagtttcttccctttgattcctccaggctgaggagcagtggttgcttcctgtagctactatctctgggctatttcagtgtttcctttgtgctcttacagccctccaacaccagacaacaattccccatattaaagcccctttgttgaaatacctaggaaggtttctgtcctctgaccaagccctggctgataccagaagagatctgaggaaaccagattttaagactggattgatcatgtccttggccttgaacacagtactgagctccttgacaatgagaactggagaactttttttttttttttttactgattgagccctggcaggcatatgcatgcagcactgcctacacagtcctgagtcagaaacttctcatggggtctctgagtctggaatgtctgagttctcagaaggggtagcatttgctgctaaccctctgcctccctagcttgagctgtctctcgtggttttttcccctgatggatgttaacatcttcccaacagagctatcaacccagtgagggaggagtctgtgtagatcacctcccatcattctccatagagtctctatggcccaggttagaagaaaaagacttcttggctcagactccaaagactagagtcagtgacagtttccttagtggtgtaaaatggcaagagtagcactaatctcacagaagactcctgcagaacacactgccacattcaaccataaagctgctctcaacagtgtgagcctggcaagcactcacgcatttaatgttgacgttgaagatctgatatgtgagccaacaggaagacctctgcattcataccctgactccttcagaagcagggcaaacctcttttttttttggactgtggaatctggaccgtcttctttaaataactcatttctgtgagtatatgtgtctgtggaaaacagaattctgtttaaggcaaagaaggtgtgggcttcactagacttgtagatctgcctccctcctcccctccctcctcccctccctcctccctccctcctcccctccctcctcccctccctcctccctccctcctcccctccctcctcccctccctcctcccctccctccttccctctctccttccctctattcctctgtccctccttccttctttttttcttccttccttctttccttccttccttccttcctccttccctctattcctctctccctccttccttcttttttccttccttccttctttctgtccttccttccttcctccttcccttccttccttccttcttcccttctttcctttgttctttcctttcaataaccaacaggcacttatattctgcttactgagactatgtcctggcttatttaaaagaaaggaccaaagagagcaggcagggaaagccagggaagactttctgtaggagggagcttcctgaaccgactcctaaggcatgaatggaaatcaatctggagaaggtgaggacgggcactccaggcatggaggacacagtcaaggacccaggagaggattcagatgcagcgaaagaatggcaagcaattctgtgttgttagggcatcaggttcaaggctcagacaggtaagaaatgaggcttgaacactaagtcagggtcaggtagtggtaggcattgtctacaagatttagtagcttggactttgccatgaagaaaatgatgccatgccttgcaaggattcttaaatatgggagtgatatggccagactaggatttagatgtgttgctcccgagctgggtagcaaaggttcacttgagcaaggttggatgtggagaccaatgagtccaggtgagtagttaactcctactcaccttccactcaggttacatgtcatttagagacatcttcctaatcagcttgagctcattctctcttgcacccccaccccattacaccctgttgtgttcttcttagcacttattccaagtagtaattacacatttatttctgtatttactttttaaatatatacccatccccagcctacctatccctagcctgaaagcttcatgaaggtagaaatcaattctatgtaatcagttctattaaaatgtttgccacatggtaggcatataaaatacatgtagaatggataaatgaatgcaggaatatttgaatgctggggacagacaggaaggtattggttaggtaaatatttaggaggtaaaacgtggtcttgtgagtattccatatgcagagaatggaaaaagataaaggctattagttgattcatgtgacatgtttactgaacacctaatataatttaataatgatcaaaacgaaagaagtcttcccctcatggagctttctatctggtgatagaagacagttatgattcatacatatatagttatgcaaaaaatgtaaaattaaaatttggacctaaagatgcaattaaatttatctatgatacctccccagtccccccaaaattcctcccttgactatgagactttttcttcccctcactttcaaccagattccaaacagcagttatatttgatgctacctttctatgacagccattcaagaaaggtaaagcatgttattagaacacccaaacagaagcctgaacctactctgcaggataaagcaaagccaccgaggaagtgactcagtgctgaaatataaaggatgagcaggagttaactagatacgacagggagacaagagctccaggaggagggaacagcatgtgcaagtgccccaaggctggggacacactgttacttccaaggttgtgcagaagaccgatgacagtgcggtgcagagagtgtggtggcaggtggcaggaggttgagtggaaggggcaggccctgagcttgcatgacagctggtattgttaccaaccaagacaacactagaggaggagcccccttatcacctaagaggaaatctccaatagaaattgaaaacaaaagttgggggaaggacctgactggggttacctgggatgcccatgatgccatcatgagatgggtagtaggtatgacaataagggtgtgtaggatcaccaaggatggccttgaagggggagagaaacactgagaactaagagaagcctgaagggagaaaacatatgtcatggagcaaataagggaacagaaccccattaaagcaaagcaaaaagcctagactgaaggtataaggaatcaggagatgggattgtcactaaaatctcttcaagagggagaacatggcaccctccaaccactcactgtccatccatggccactcatcaccaagcacatgctaagcaggaggcacagagcaggctgagcaccgaatgtgaagggaggaatgggctgcaagtatagctgctttttgagaaatttagttgaaaacaataggaaagaagagtatcatggtcaagggaagaattttttttgtttaatgtattttgaggtcagggggtggagaggcaacatagattaatttaattccatttgtacgtttaggggaaggacctggtataaaagaagaggtaagtaatgtttttaaatgggaggataattgacggagtaggattccagcacaggtagaagggcaagagatcaatgagaaacacaagccgcagctttgcctagctgctgtctttcggctacagtttcccttaggaagacaagtgtaaggcacagaggtaaccaagggtcatgcagcaagttgggggtaacagcagatgcaggatgctgctttccagcatgccagcctcttttacccagtccaagggtctcatgtgtccaggtaacccataacctcatgtgtgctggcatgatccagtgtgcagactttggacactgggattccatggccctgggacactttcttcaggagcagttggaggcacagaccctggcctttactccagaaaggcaccaagccaagaggattagctgggaggtggcacatggagatcacagacctgcaagtgagcagctggggaaggcaacaacaccaagctgagaatgccagggactgattcgcatggacaaggcctttcctttgtggaaggcgtataggcctggcatgatttgaaaggcacccaaagaggccactgcacctctcactatagccctgccaaggctcagctatcaccttgacactctatgggactaaagcaaaaagccccagatagttaagtggaaatttttgcagaacaccacattgagccattgccactttaggactgggcagagccgcaaaagataaagcaaaaggataaagaggaaagtactgaagcatgggatttgggggtcccaccatgcagaatcatgggaatccatgcaacaaccataaccaatgtaaaccatttttctatcacttgtatataagaaaacactaattacagtagacaaagacagggcccctgcctttgagtaactcataaagaaactcaaatagagaaagttactgttcaatgcagtcagtgctatgataggaatttgtgcaaaggactataggaacatggagaaaggatttccacatcttaagggtttggatattggtgcatataacaagaattttggtcaataagtgtctctgttttctttctgccatcccaactactcagagctctataaaggatgaagaaattaccaacaaagtcctaagacctccctgaatggtcacttttcaaaaggatatgtttctggacagcaagcttcacctagacctttgctgagctccaatccctttactgtacgataagtcctctctgaccccaggaaagcttgcatttcccgtctgagtacctttcactcaggaacctgcttgcatccggccaggcggtcttgtcttcctcccccatacccaccccacctccccactcacaatcctccagacatacaaagagtctttgcttatgaggcttcaaacctcttcctgggccacaccttcccccctcaccccacttcccgcccaaccaggaggctcctactcatttttggcttccggcctcaaagcccaccccacctgcagctgcatgaagaggtggtcagcacagtgggcgccaatcgtccccccaaccccagtgcaggaaggaagtctgcacccacctctgggcatttggtggtgactcacccagaagagtccactcccccacaccggacacaggaaagacaaaggtctttccattgcagagactcagcttaaaacttcaaaccataggggccatctccatctgcagccagcaggctctttccaaattctctttcctgcctgtcctacagccacactaaatgtctttcaatttcttgaaggcaccaagactttatgcatggatttctttccccctgaagaaaattcttcacctagttacctcctagatactcttccttgcagcttccctctaaccacttacgggtctccccaagcacctggacttatatccttcaagaaagataaccattaacatggtgattcctaatgtgtcttatcatatcccccaaaaggttcgaagttccttgaaggccaggattcttgtcttgttcaaggttgtattcccagtgctttgtacctgagtcatgataggcacttggtcaatgtcttgagttgaaaagaaatgaaaaccataatatacaaacaatcattattattgtcagaagaatgttggaggagtatgaagagttattctcttacgcttaatttaccagccatcacctggcctaaaccagtggttttcaaagtgtgaccctggcctagcagcattagcaccatgtggaaacttcttagaaacataaattcttagttcaatcccagacctactgattcagaaacttagggcattgtgctcagtactctgtattttaataaccctcactgccaagtgattctgatgcacactgaagtttgagaaaacactccctagtcctagtcctactcccaagattgggtcataacattcaaccatgggaatattacaaattagaaaaacgttacatttatagcaagatttgtttatctaaataaacacttctccatcctggtccccctatcttcttttttttttttttttttgagatggagtcttgctctgtcacccaggctggagtgcagtggtgtgatcttggctcactgcaagctctgccttgcgggttcatgccattctcctgcctcagcctcctgagtagctgggactacaggcgtctgccaccatgcccggctaatttttggtatttttagtagagacggggtttcaccatgttagccaggatggtctggatctcctgacctcgtgatccacccacctcggcctcccaaagtgctgggattacaggcgtgagccaccacacccagcccccctatcttcttataggggtttaagtcagcagcaggcataagttttgttaagctccattcgatagataaaaacactaaggttgaaaaaaaaacccactttctcaaatgataagactaaaacaggcagtgtcaaagaagggatcaggcccaagactctttccacagtaacacaaagtcattcagaagacagtcaaataaaataagcaccagagaattcaccgtttaggggccagaaatgtgaatgcatctttcccagcactacaatgcttgctgataacggtaaataacctctcaggtggcttcctgagggtttgggtttctaaggatgcgagtcagtccttcataataattaagagcaatgtcccacacaacttacagcgtcgttttctttttttaaaaaaaaggcacaatacccaattcatgccaccccagaatggcattttttttaaacctgcttcacatttgtagaggtgaagaacctccacctctaagaaaccttgctttcagatatagaggtcccagcctaaacacctaggtttgggtggatacggcccggaaacttctggaaaatgaggacaaagctggactgctgaaggtcttgtctgtgtttgggtggctgtctggcgcccccttgtgttcagtgcctggacccaaaagagccggaaggcaacaatgatgcagtgagggcaaatggctacagcaattcacaaatggcactctggccagtgaggaccagaggaatgggcttaggactgggcaaaggcccctctgcccaccatctgggctctcctgaaggccctccaagcactcttccagccctagtggagaagcagtcactaggaagacttgcctggacaggcataggtggaagctgtgcccaagctcacccgttgtgtccaccaggaagatgggtcattgcatccttcttgctgggtgtttggccagagggcttttcctcctgacttactgcccagggcagaggcttagagcacccccacctcccttttttttcttttttttgacggaatttcgctcttgttgcccaggctggagtgcaatgatgcgatctgggatcatcacaacctccacctcccaggttcaagcaattctcctgcctcagcctcccgagtagctgggattacaggcatgtgccaccatgcccagctagttttttttttttgtacttttagtagagatggggtttcaccatgttggtcaggctggtctcgaactcctgacctcaggtgatccgcccgcctcagcctcccaaagtgctgggattacagatgtcagccactgcacctggcccccaccccctttattaaagggaaattgagtgttctgctgaagacagcttgggcccctgaggagacattgcaaggcagttctgaatgtgctaagtcagtgggtgataatgggcactgtgtgcccagcaaaggcacttcccaccctcggccataaacagtctttaactggttcacacagaaggctggggttggctcttccttctcacctgcctgctccctgactcccacactgcagggctctaccttcccagtcatatcaccaaatcctgcccttggtgtgaaaaagaccatggcatgttcagcacaaaacagcagagccaatgacaagcatccaggcatagctctagccccagaacagggctcccctcaaggagcagccctgatctgagccttaaattctggatggatctcagctcctcctcatataagctgagttagacaagtcatataaatcagagcactaaaactctctgagccccagtctcctcatgagaaaaatggaaatctcggccctgaaattagcccagtatggctctaggtactatagagttgaatatgttggaaaatctaacagacaagtatcctcttgcctctgagtctttgcacattctgttcccactgcctggaacagttttctcccctctctccctcacttggctagtacctgtttatcttcagtctcagcttagacctcctcaggaacccttctgtgtttccttgagccaagtcaagttcccctccagtggttcccataactctctgcatgtcaccagtcccaaaagtggtcacaaaatatgttaactggctgtttgctggtctaggacctcactgtaataaaccccatgagggaagaatagggatcatgtctgccttattcaccttggcatcatcagggacctgtgcagtgcgtggcacatagttagcactcaatacaaatggatttgactggatagatgggctcagaatgaaacacaggctggggccagagagcagaggccaagtcaggaaagcagctaagggaacgtgtacacacatccatgacgtggatagattcccacagtggcctgtagcccctgtgtcagtcctggaacccagtgctatctatgcctgtgaggaccctgcaccaggtccctgctgctctggcctattagagaaagaaggaaccttgggggtcattcaggccagaagtccacagacagagctcaggccttctctgcccaagctctaccagagagtttctgcttttattcttttgtatttttttttctcaatgaggtagtgttttaaaatctggttccatgaggagaaggagaaaggtgaaaatcacctgtgccgtcattttacaaaaggaaaagagactctcagaagagaaggggttttccccaaggtcaaacggctcagtattggtatgggaagaccccacatcctcaattccttacacacttttcagagggagggaagaaaataggggattgtgatttggagtgaagggctgagtctgcctgaagagtccccaagcccaaggtgctcctgtgacaccatcccatcgtgggggatgagcatcacataccatttgtgccagcatcttgggagtgagaactggggaaggggtgcagaggggcccacagggcctggccgtgggatttcatggtcacagtcaaacacacacacacacaccagcacctgtactcatagctaatccccacccaaactcctacctgaccctgacagctgtccctgggaatattgtctccttaggccatggagggctgaaccagctgggaggggcctttgtgaatggcagacctctgccggaagtggtccgccagcgcatcgtagacctggcccaccagggtgtaaggccctgcgacatctctcgccagctccgcgtcagccatggctgcgtcagcaagatccttggcaggtaagcacgaaattcaccgcaggccgccttccccgcagggcttgacttctccagctgatctcagggcagctagagaattcccctcccagggaacggggatttgctcccaatgtccagctttggtcctgagacctgaacagttatggtggtccttctgggcctctacccagccactatttttctactgttttcttgcccttccttctttctttgtccatttatccttcttttagtttctccctctcccttcttctcttttgctccatgtctcattagctataggcttctctcctgctaaggcaagagaatcttcccccaaggtcctcctcctaccgagacctagggaaattaggccactagggaggggacacacagatgagctcccaaggtctaacccctaaaagagtgatatctgagtttgtgcttctcaaaccataattccccaagaccccagatcagtgcttcatagccctggtagcacattacagtcaccaggggaagcctgatttttaaatagcaatactgtttatgccccagggcagaccaattaaatccgaactttagggaaataggcgcaagttttggcatataactccccagcccatccgcccccagcaagtgactctaattctctgcagccagggttgagaaccactgacccaaagattcagaagagaccaggagcagcaaaggcctgcttctgagctgatgcagtcacagattccagtctgcaaagccacttccattaaaaatgcctctgtgccacagcttccagtcagctctgtgtacgtgtgcctgtccccctgctctgacccttaggtggatttaggaggagccctggttggacaaggtaaagggacctggactgttctttgaaccgtgaaaagccctggctcccctcctgaagtagttagggaaaggcatgatcctttgctgggctagggagaggggattcctgtgatgggttgtggtgtcccagaagagatgagtcctggatggaagtaacagatgaatggagttttaaagagctagattctttttcatgcagatgagagcagagagtttctacaacaagaagaggaggatatgctgacacaggcggttgatctgccaaagcaactagttggaggatagagggaggggaagggtggaggccccagaagaggaggctcagcttaacaagttggacctggctggggatccaagcaaggtcaggattccagagtccatgaggagaagcttcaacttgaacctgctaaaacctgatagaaaaccagtgaccaggggggtgagggatatgcctcaggcttggacagggcagggagcaaaggtgaaccagcaagacagagcagagggtccagtgacctcggctagctttctaggtggccaaagaaaatagtcagtcattggctgggcatggtggctgatgcctgtaatcccagcactttgggaggccaaggtgggcggatcacttgaggtcaggggctcaagaccagccaggccaactgagtgaaacctgtctctactaaaaatgcaaaaattagccgggtgtggtggcagacgcttgtaatcccagctactcgggaggctgaggcaggagaatcacctgaacctgggaggcagagtttgaagtgagccaagcttgtcccattgcattctagcctgggtgacagattgagaccctgtctcaaaaaacaaaaaaaaaaaacaaaaaaaacctcagtcgtgctttagccaaaagaagctggatagagcaaactgctgtgcccctgtcattcacacatcaggcacaccaagatttcctttcttagaagggaaatcttttgtgccccatacaatggctgttgcagatgctaggacacaagagactggccagagggaaggaagagagagaagccaaggtgaggcctttagcagagggtgctggtttggcagtagcatgaacctacccaagtgagggaaacagatagttccatgcacatcaagcgtttgagaccagccttggaggcacatttcactctcatacccctacccagaagcctcagagaggagggaggctctggctaaatccctgtctaaagaccccacctgcttattgggtaattctttgggattctctattggagtaggtactacgagactggcagcatccggcctggagtgatagggggctccaagcccaaggtggccacccccaaggtggtggagaagattggggactacaaacgccagaaccctaccatgtttgcctgggagatccgagaccggctcctggctgagggcgtctgtgacaatgacactgtgcccagtgtcagctccattaataggtaagagagaaagcagcctctggtgtcaggctggggcccctgggctttggggaaatcaggaaagagacaagaaaggcctggcttgggtggagcagaggccgggaaggggcctgatgctgaacaatcaggcagggagcacacctggctccaggcagatatcatacctccctgcctcctcccttgccccatgctatggggcaccctccccctggcccccagccatagtgtgctatctacagtttccttcctcaaacaccacatctgctttcattcaataaaagaatcttcatgaattgatccttttctaagccatcagacccctaacccagcccacattcaagcattcattcgtttagtccctcaatgattcactcactgcctcaatcaatcatttacttactcactcgcttgttcattaattcattcacacataattcactcattcattttgtgctaggccctgggacacacaaagcccatctttgcggagcttacagtctaatgagaacacagatattaatcaactacctacaaaaaatattgtaaaaatgcagctgtaagtcctgctaagaaaaggaacatgaagatatgcaaggtagcacaggattatttggtttatgaagttcatgaaagtcttcccttgagtaaaaaacaataagagaactaggtgaaaagagctcagacagttatgcaaaggccctgtggctaataggatcaaaagaaaaccagtagataggccaggtgcagtggctcatgcctgtaatcccagcactttgggaggccaaggcaggtggatcacctgagatcaggcgttcgagaccaacctggccaacatggtgaaaccccatctcttctaaaaatgcaaaaattaactgggtgtggtggcgagtgcctgtaatcctagctacttgggagactgaagcaggaaaaccacttgaacatgggaggcagaggttgcagtgagctgagatcacgccactggactccagcctgggcgacaagagcaagactctatctcaaaaaaaaaaagaaagaaagaaaagaaaaccagtagataaagagcaggggagcacaaggtaggctgaagttgaagatgtcagcagaggtgacctttcagaggctgggggctgtgttatatcttcttgcctttggtcataaagcaatgggaaacccttggcagattttaagccaacttgcatttcagaaagtccactctggctgcagtagggagaatcacttagaaagggccaagaggggatgggcgtgggccactgagtgaccctggaacactggtgatgacatgcactaaggtgctgatggagagacgcagagaggggtcaacgttggcaaggttcacaaggtcaaaacacagaacttgatgatgggtttgataggaaagagagggaagcagaggttaagccccatctctgttttggccttgagtgactgatggtaccaatcatgaaatgcggacaactgaggaggactaggcatgcggagtagggtcacagacttgactgtggacagttgagtttcaagtgccttggagatacccaaaaggggtgtcaaaaaggcgactgggtctggggcagccatgagttctctttcctcctcttctctctcatggcctttcttctcttcatcacagaatcatccggaccaaagtgcagcaaccattcaacctccctatggacagctgcgtggccaccaagtccctgagtcccggacacacgctgagtgagtgctgagagacctggatacacacacatgctcgtgtacacctccccttcagcatacccacatatacacagaggcacacacagacacacccacacagacatagctgtgcacagtaccattcacaaacccatgtgtagactgagttgtgccactgcgacgaagtctggcctgttcccagggcagattcactgaactatggagaggtgcaaacacttgagacagctctaactccaagaatccctcccaccaggaggccccctggaggaaggacctgagcccctccagggctcagtccatggttcggcttgctgcctcctgcacagtgtcagcagggactgtgaggggtgtcactctcactccctgaccctctccctcttcccaccaccgcagtccccccagagtcaccccagggctgtaaggggtgtcccaccccttgctcctctccctctcccccagcccctgcagtccccagctcaactgtaactaccccagagtcacccagggctgtgaggggtgtcactcccacccctgaccctctccctctcccccactgcagtccccagctcagctgtaactcccccggagtcaccccagtcggattccctgggctccacctactccatcaatgggctcctgggcatcgctcagcctggcagcgacaagaggaaaatggatgacagtgagtgctgggacaggagggcagcgggcggtgcacgagagcagtttgctcaggctttgatggggacagaaacccttccacttatgatatgggactttgtaggggctctgcatgtgactgtcacatgtcctgtccctcagttggccaaggctcctgggcccacgtggctggccctttttctccctccacagtgagtcagcttggagtcagtcctctactttggcctagagcatgaatagataggtcccctaaaagctttcttccttcccggggggtaccaggtgatcaggatagctgccgactaagcattgactcacagagcagcagcagcggaccccgaaagcaccttcgcacggatgccttcagccagcaccacctcgagccgctcgagtgcccatttgagcggcagcactacccagaggcctatgcctcccccagccacaccaaaggcgagcaggtgagaagctgggccctgggaggtgaacagggtgggcaagggccagagaaggtctattctccaaatgagcctgtgctccatcaaagcagctggaagttgcatcaatgggctcagggcacctgccttatgcaactccaagcctgacacatgctttattttaccagatgccctggcatcttcctccctttctaaccctcctggcttccttcacccaaaacctttgagcctgggcctttcagggatggcagcacaacctgatgatgctatcccttgccatcagcgtctttcccagattgcaacatcacgttccacaactctgaagcagtagcacaaagccttcacataatgacctcagccactatttcctagccccacctttggccactcatcctgcacaccccatgctcttgcattactcatggccccgagctcaccaccctcgctcacacctctctgcccttgcacactgtgtgccctccacacagaatgcctttcctcccacttctctgcatggaaaaataccactagccttcatgactcagccaaacatcaccctctccgtcagtcctcccctgcccctccgacatgaatcatctctcctgcctcttgcccttctgcatgtcccacatgctgctctcagtagcttctcacagtgtcacttaataatctagcagacagacaggtacaaagacacgcggactccttaaggacagggaagcctcatgaaacgttaaacatcgtttttattcccagcacctaccattgtgccccccttataatagacagtaatggtatagtgaatgaatgaacaaatgaatgagttgagaaatccagaataatacatcacaagctacagcgaatttttcttgctagtgctcaggacaggtgaaatgaatcataacaggttggtgtccgtgaaaagctgacagagatgtgagaggtcccaccctgaggccaacaaagactctgcagctctggcagaaccactaagctctcagctcctagtcatcacatctttttcccttaaccctgccaagtcaaccagatgaggagtgtcttcagggtgggtctgttgcccctctttgcccatgccgtcatttgctgtaggagtgaggcaagtccatatgcctttaagaaccgagtaggacaatggagatgatgccaataatcagcccaaccacttccagtgaccgtctgggctgctggtcccgtgccagcactcgcagctgggcaggcaatctgcatcagcaattttatcagcgttgactgtggcaaccacgagcgtgcagagaaagctgaccatcagcagcatggggagagggcctggggtgctcacgcaccagtcagcacacagctccaggaaggaaaggggttgcagtggggggcctgcaggaagctcactctgtgagagtaagcctgcaaaactcagtgtgcaggcaccagccactcagtgaaagtaaagaaaccctgctgatgagactctggacacccgctgagtcccagagccatttcctggctccatccctaagccccccaaaggaccctgcttgactacagagcacccccatgccatgctggcatatgaacatggggaatcctggaatgagaaagtctttgagctttcagggacctccatgaccaccttgtccagtttctccatttgtgtggagataatccaagcaagacaaggagggcttgggcaatcagaaggttttggagctcaggcctgccaaccctcatttcattcagactggtccactgtcacctgtttcagatatggtgcttctacgtaaacacttatttgaagactgaaaaaaaaagcatttgaaaaccattaaacttctccaaccactcatctttcagatgaggagactgaggtccagcagtgtccataaattattcattacctcctcagtcaatcattattcacccagtcattcacctggagggtggtgaaggcagggagaaccagccagtgcaagggcccctcatgtcctgcctggcctttgcttttcctacctctggtaactgactgtgctgccaaagtaacactccgtgctctctcacctgggcataggaatgccctctggcttggggagccaagaaagaagcacaagtattcatacctgaccttaggacaggttgtaacacagctatcttttctgcaaaatcaacaagtgggggaccaggcatggtggctcacacctgtagtcccagcactttgggaggccaaggtggatgggtcacctgaggtcaggagtttgagaccagcctggccaacaaggcaaaatcccatctctactaaaaatataaaaattagccaggcctggtggcgtgcacctgtaatcctagctactcgggaggctgagacaggagaatcgcttgaagctggggggcggaggttgcagtgacccgagattgtgccactgcactccagcctgggtgacagagcgaggctccatctgaaaaaaaaaaaaaaagggcagggggaagtgttcatcagaaacatcatgtggccttattcctggttgctatttcatgaccagacatagctagaagtcatacagctcttgtttccctattttacaaatgcatcaaaaaaaatcaacagaatatgaatatcagtttattgacagaaatcaagaatttggtggcttctgactcttcacgattctgaaataatatctgtgataactctcattgggcatctgctgtcaccaagtattcggtgctaagcacattatgtataagtatacaaaatttcatgtaatgcttacgtcagcctcataaagtagagtctatgattcccatacaggtgagaaaattaaggttcagagcagtcaagtagactaaagctacttggcaggtcattgcagaaccagggctcagagtcgctgaagttctgaagcattgtgctgctctgccccgattcaagttcaattccagctaaaaagcccaataatcactgggaagtttcagtcattgaatacaaaatcaccaaaagatttgactatataggttttctttttcctttttttctaagttacttggattttgaaatagctataggattctgagtagatattttgctgtcaaaacaacacatccataaagcattttaaacttctcttatacgctctagaaattaggtattttgttcaatttcaataagacacaccctggccaggtgcaacggctcatgcctgtaatcccaacactttgggaggtcaagccaggcagatcatgaggtcaggagtttaagactagcctggccaacatggtgaaactcctgtctctactaaagatacaaaaaattagcctggcatggtagcacgcacctgtaatccctgctactcgggaggctgaggcaggggaatcacttgaacccaggaagcagaggttgcagtaagcgaagatcgcaccattgcactccagcttgggcaacaagagcaaaactccgtctacaaaaaaaaaaaaaaaaaaaggccctaagcaactccaccctgcctctaagtgggcccccttggaaggcatggaaccagagcaccatttagtcaataattgctgctatgtgctaatggtgccctggtggcctccagaattgactgcagcttccaaaagtgcccagcatgcaaccggaaagtgctgtggatctttgcagaacccagctcgatggaaatcactgaaaacaattgcctttagtggcactgttatgtaactactgagcattccctgaattcagctttgcacatctcacgtagcaggtatgtgacgagtgtgaaggtatgtggggaatgggtgtgttcttttttctgcgctatctgcttccccagtggaaggaggccatggtgaggatgaggtacacttacctttagttaaacaagttcttttcggaaggagtacctaaggtcatagctgtgctcctgggaaggggaggccaggaggcatctaaaatgaggtcttactgatgaagacccccaggtacttgacaaagagtgtttccaacaaaaacaactctcaataccattttcaagccgaacttgcacacttctatttgtttggatgtggagagagaaaagaagaaatccacgtggtgggtaaagcacctgggtccacagccgaaaaatcccgggtttagtctgtttcactatacaaaattgggccatttacctgagttccaggctccacatataaaacacagacataatattactcacccatgtcactgggctgctgggggactctactaggacaacagaggcaaagctctgatataagctctttgcaaatgtaagaagtggtccttatgtcacccagtttagggcagtggttgagagcagacacattctgatccctcgaatctgaatcctatctttggcccatctggaagtgggacaagtttcttaaacctttgtgcctgggtttcctatctggggaagaataaattaacagatgcaaggaccctgaacagtccggttggagactgctccagtccttggcaccgtcctgcattctgtgggtcccaacagtgtggtgaaaccaggaagccgaccagccatccaaccagggtgtggtcctctggctgagactctctatcccacgtctgggcacccatgctaccagctggccttgaattccagggatgcgggaggacaatgagcatgaacgaaacgtgccgagtggagttgagaacgtaaaggaagaagggggcgatgaggacctctcctggggagatgagggctgccaagtcctaagacacaggctcagggtctgcaggaaggtcggcttgttggatcgtctctgtgcgctgacttctctttgctccccagggcctctacccgctgcccttgctcaacagcaccctggacgacgggaaggccaccctgaccccttccaacacgccactggggcgcaacctctcgactcaccagacctaccccgtggtggcaggtacaacgcccggagcctccctggcaggtggagggcgggggactgaagagcttggctggctgtcaggcggaaggtgtggggccctggcctggagaggagaggcgggctgtgccggccgggccgccaggtgggcccaggggtcgcgcctccggtcctaggccgggcctcaaggtgggccgaggggtcgcgcctccagtcctaggccgggcctcaaggtgggcccaggggtcgcgcctccggtcctaggccgggcctcaaggtgggccgaggggtcgcgcctccagtcctaggccgggcctcaaggtgggccgaggggtcgcgcctccggtcctaggccgggcctcaagctgggccgaggggtcgcgcctccggccctaggcggctcccgtaaggtgggccgaggggtcgcgcctccagtcctaggccgggcctcaaggtgggcccaggggtcgcgcctccggtcctaggccgggcctcaaggtgggccgaggggtcgcgcctccggtcctaggcggctcccgcaaggtgggccgaggggtcgcgcctccggtcctaggccgggcctcaagctgggccgaggggtcgcgcctccggtcctaggcggctcccgcaaggtgggccgaggggtcgcgcctccagtcctaggccgggcctcaaggtgggcccaggggtcgcgcctccggtcctaggccgggcctcaaggtgggccgaggggtcgcgcctccggtcctaggccgctcccgggtctccgcgctccctcctgtgggagaggcgggcgcacacacgccttccgggtctctccattttcgctgcagaagcgcagcagggaggtctagcttctctctccccgccttgccacgcctcgtgggccccggctctccccagcccagactctgagggcagctgagcctgccccgcgccccgcccgcaccctccacatcccacggcttggcttgtgcgtgttccctccccgccatctcacacccctctctccttgttgtctccctccctccggcagatcctcactcacccttcgccataaagcaggaaacccccgaggtgtccagttctagctccaccccttcctctttatctagctccgcctttttggatctgcagcaagtcggctccggggtcccgcccttcaatgcctttccccatgctgcctccgtgtacgggcagttcacgggccaggccctcctctcaggtacgacagggaggtcccggggccatgcagctatggcggcgggtgggacgggggtcctcagggcagaccgccagccccctctctggcctcagtctcatccacccccaccctgttccctaattcctccggcaacttttggaggcgccaacatgaagttctctgtgacggggaagacatgctcggaaggggcggatgctgtaggggtgccggggatgcaccaccccaagaccccatggaaaagcaggaaccctaaggccgggagccgggtgctgtaacgtagcaacttggccttggtaaatgcataaatagatagaaggaaaaatgaacattttggagggaaaaaggaattggcttttggagcccatttctggatcaaatttctaaaaaggccaagggtcagtcccagttgtgtttccatgatgcagctatcttcattcctagcttaacagcatcaccgggaggacagtcagacatctgttaaacatgataaattcagtgattcaacaacttgagaggagtgggggacctcccatcaggaacctcaactgcctcaaaatatttaaagctggaagcaccgaccgggcgaggtggctcacccctgtaattccagcagtttgggaggccgaggcaggtggatcacaaggtcaagagttcaagaccagcctggccaagatgatgaaaccccatctctactaaaattcaaaaaattagggggtgtggtggcagacacctgtaatcccagctactggggaggccgaggcaggagaatcgcttgaacccaggaggcataggttgcagtgagctgaggtggcgccatggcactccagcctgggtgacagagcaagactccatctcaaaaaagaaaaaaacaaataaataaaaataagtaaatctggaagcacctgagggagcctctagatcaaacctcttatgctgatgaggaacctggcccagggaggagaaggtccctgccaaggtctctgggcaggagcaccatctgtagctggttgaggcctgggcctgcactgcatgagtcagacctcaaggggagctggctcctcctggcagaaggaccttcgctcatccagccagggcctgaggaatggctgagagtcaagcgcttggcttgggttggagagggcctgagatgcagtgaaagtgggaagcagagacccatatggtcttcagatacctcaagggcttccacagggataggactattttagatgtgggcccagtgggggcccaggaccagggaaggaagccagctagctctcagttcagcattggaggaatctctttaatagcggcactgtctccaaggagtgtgggtatttagtgacagaagtaaatgcctcttcacctcccacaccctcctaccccgacgaccttgaaatgctggagcagagaccagtgcgtgggtggggtgtgtgagacctgtcacagaggcagcccagagtcagacagtccatctggaccagtggtttcaaatttgggcctctcaatgctctcttgaaatgaagccttttacagaagacatgtatgctcaccagacccctgaagaactgctcttttagaaggggtccctgcccctagaaagcccttggacttcgaaaccactgcaccagaggattaagacctctacaagcccagagtaaccacagggtcatgtgataaaagtccctggacccttttttttttgtttttttgttttttgagatggaatctcactctgttgcccaggttggagtgcagtggcgcgatctcagctcactgcaacctccacctcctgggttcaagtgattctcctgcctcagcctcccgagtagctagaactacaaatgggcgccactacacccggctaatttttgtattttcagtagagatggggtttcaccatgttagccagaatggtctcaatctcctgaccttggtccgcccaccttggcctcccaaagtgctggggttacaggtgtgagccactgcacccagcccatggacccttttttataactggctctacattttctttctggctggcacccgggtttttttttttttttcctccgtacatcccagcacctaatgtgagaagtttccttagaagagagggacatccagtgtgtgggcagagagatggtgtttaagggtctaaagcgaggagttgacttggagttcaagaattcaagagggtgaaggcagcagagatgggtcatttgttttgaccaaagtgatgaaaagagcaaaacctgtgagctgagtaaaattatgtcagccagagaaaatgggatgcggggtagggaggggaatgagaggatagtggagaggaagggaggggaagggaagggaggggaggggaggggaggggagggggtgaggagaagaggttcatgtcagttacagggagttacgcaagcctgcatgtcttctgagaatggcaggctagagctggcggcggtcatggggcaggcaaggggtgagggtgtggtggtgcccatgatgatggggagcaggtgctgtggaagccgcggagaagcttggcaagaccagctgaaggagagggaaggatgtagggcagctggaagtggatagatgtatcagagtgcagacataggctgtagtgtaaagtgcaactggaacagcccagggcaaactccctactcccaaagcccctacactttgtcccctccctgtcatcctgttagcatcccctgtcaacatgcagtcaatcagaggtgacgcctccaactactgtcagctgttaatttagtggacatgcccactctccaggccaactgcaggactgagaggtcacccaacccatgggacaaaacagctggcagcagacaccaggtagtcatgtaggaagcaggcagccaaatatgcagcaccggcatatctttcaggctggtggcccccaatccaggcccagatgatgctgaagtgcaggtgtgagcactttgaaggttgctggctggtcacagggccccctagcccaagggttgacaattcagcacagaggcagaggctctgaaaagagtgaggagtgctagccttggaggatctggggtccaggcaaatggccaagagtaggaagcaagtcagaaagcagctcaggcacaagggaggggatggctggtgtccatgctgagctcagggtgttggcctggagctccttacagactgtccacctgaggcctctggtcaagactggatctcaatacctaacacgtggctgagccatggtgagagagctgggaggacatgacggggggcggtggggaaggttaggaagggaatggttccaggagcgcaggaggctgcagaccttcccaagaagaggtgaatttgaaagaaagagaaggaacctgggcccaatggctcacacctgtaatcccagcactttgggaggccaaggtgggtggatcacctgaggtcgggagttcgagaccagcctgaccaacatggagaaaccccatctctactaaaaatacaaaattagccaggcgtggtggcacatgcctgtaatcccagctactcgggaggctgaggcaggagaattgcttaaacccaggaggcggaggttgcggtgagccgagatcgtgccattgcactccagcctgggcaacaagagcgaaactccatctcaaaaaagaaaaaaataataaagaaagagaaggaagttgaggccacattattcctaagtaatgctgcagaccaggagagaggagagaggacacagtgagttttcattccataatcagctcagctttaacccgcgtgaatcttccacatgcctctgagtgactcccaaggaccctcgctgccgcctcctgcaactccttcactacttcatagcgtttttctctgggtcacttatttccgcctggtggctctgatagtgtgatttccaaggtgactatccttctgagtctcagctcatccccagtcagccaagaaagaagaaacagcaaggtttggggaatagcaagagtgcccctaacattgctgccagttccctttggaagccccagtctggagtcccaacacactggccaagacagcaatgtcgaggccgtcctggtcccagctgctctgggactgcctccagctcagctcaaaggaaagccatgagttaggttttatcatcaaagagtccattcccctcctccatccttttgtacaaaattatatttagttctgccaaagagatttctgagttgccataaattctccttgctatcagaacgagataaggaattgaaaaggggttacatggagggcagacttcaaagggggaaaataaaatagtctgaaatcacctctaccctctgaattcctccaggcaatagctttatgattctggcctctaccaatatttagaatatttaccaatatttcaaggtgtagggggagctagagttttcttagagaactccacggccagtcaacatgggcctatgctttctgtcaacttcctaaaataggaccacgttggaaagaaatttgggtgtagaggagatggaattcatagcgaggatcgttttatgatgaagagtcttaaaaacagagaagtaggtaagagggcatggttaggccgtgatggagtttccaccccacagcttctgtggttttgtttctaagaaggcttgcaagcttcttggctttttggaagaaactatgcatttaagcaattggagcaaagagttttgtagggctgttgggagagtttattgtgccatagtctgggtgagagccatgctgaagaaagtcttaccagtctttccaggaagaccagctttcatggcaggaagcctcaggcgtctgttctgatgtccgattcagaagcctctaccccattgggaagacattaggtgactgaggggagatgaagattaaaaatcgtagagtacaggggagtgagactgatgaattccatttataagatcaatgtaggggctagttctcatgcggtggagccccgtgggggcacctctggaccatattaagctgtgttgtaaggggagtatatgccctggaactctgcctgctactctgccaggctcgagaggcagcaggttcaggtaatagaacgagaaggaacaggatgaaggcagggggaaggggagtgcggggccacaggctgccaggccagaagcagccctgcagggcacaaggccagcaccagcaaacaggtgacctgagagtcaagaccacctcccactgctccccaccccgatcatggcagacacaggctgcctcagaatccttctcaacactgggtgccaggaggtccctaccagccaatcaggtagtcaggtgaatccagtttacaagctgaaatctaaactagttccttatgtgacaggcaggaagacgtggttcagagaattaagtggctgtctttcatccagggtccagcctggatctggagttccctttctctctctctcatggaggaagaggtagggagggaagagaaaagaaggaagcaggcctgaatccgccaccaccttcttccatcactccctccctcaccacctgtccctgctctgtgctcctcctgctctcacagacttcctgtcactccttccctcttgcctagccggtgcttcatctgagggccaagggggctgagtttgagggtcgattgtgttgtattcttcttcaaagaaagctcagattttatctcagtatagcttctgcatatttctccctctgcgtctaaatatcttaaaattctcttttcccctcctgtgtttccagcccttcatttgttcccttgatgaccttgtgtcaggtaaactgaacacacctgtagaattctagtgggtttcaccccatttggtccagtgccaagcacagctggacactgcaggaaaagtcaaacaaattagaaggtggtgttcaggtttaccaaaacattcacacggttttaaacaatgaacactgatggctctttattctgtaggagttcactggcatataaccatttctagaatgtgtccattgtgctaatcaatgtccacctgtagcatgaaaccctggctctgaattatgcagataacctcatagaaattgtaataaggtgcctacagctatgtttttttttccattttgcatatgaagaaactgacccttggggcacatactaggcttatctaagggcactcagaaaactagccacagaagcagtataaggactccaggccctctgattcccaggccctgccctctagaggaagggaagaagttgtgtgtgcctggtttttgttcattgaccccttgggcttggctccaaatgcctatcccagcctatgtcccttcttgatttagtgcccggccttgctaatttagcatcctggctttctgctatatacccaagtgcttagaaaagtgtctagaatatagtatttactcagtaagtatttagtgaatgaacactgtctttggggaatctccagaaagagagataaggaggaggtagtcactgcagtattggcaacttacaggctttcatggggccttccttcccttctgtcatgaccaggcaccccttgaaggggctgaggtatgaaggacctgggggggactgatgggtggatagttggacaagcagtgccatagaggagatgaatttggtaagttggttaacagggctcacaggtggcccacacaggtcctgggaggaaaaagcagcccccaaaatggaagaggcagaaggcatttgggtaaaagagtcatagtccaacacaatggttcttagccagcagcgattttgcccttactacctcctgctgaggacatatggcaatgtctggaggcatttttgttgtcacactgggtgaaaactgctgctggtatctactggatggaggccagaaatgctgctaaacatcctacaatgcacaggacagcctcctgcagcaaagaattgtgcagcctaacatgccaatgttgctgagactgagaaactctgtaaatatcaccaagaactaggaagagcaaataactcattattccaactggagcattttgagaatgaaatgggcattattaacaaatatgctgggatactggtcatcacctgggtacaccttggcaaaccagggtgtattgtcaccttgccaagaatcttggggtgaaggagaatctgattggggcctgcaggacacaggagcaatagaagaggggcaggggcaagggatcatgtttatgttcattgttatatgcagtagatggggagatgctcgccaggtcaggtggggcctccaaaatgggaaagtgatttctcgatgtagaggagaagcagagccgggaaatgaggtctttacagagctgatttggtatcaccaaggtgggggtatgacccacaagctatagataaacagagagattggtgtctgttttgctaaaaatggttcttttcaaaatagaatggacagatatgtggcttgtggtcatgtaaaagctaaatatctccgccacatctccttctaggttggggttagccaatcggtttcctgtacctggcaactctgatagattgcatccacttggaaggccccctctactcagggggaaatggtatagtggttgattagcaatgtctgtcacaggccccccaaaaaatagtgatgagttagtggcccacatacatgccatcccttcatagggtcttattcttggtactcctcagagccgggaatgaaagggatgagctctgagttaagtggtctcaaatgtatttatggaggccagctatacccactgctctgctggctgctgttgggggtaacagaaaacagaagacataacctcagcctccaataccaggacattcttgtggattaataagataacaatcacgtaaacaaaaccactggagaacagggaacagtgtgagactgcagtaacaagtgctccctgcatggtggagcctctgtcctgcagaagaccagacagaggtgaaaagaacttgggctcagatgaggagtgggggcaggaggaagtgggtttggagaatggctgtagagagggtgggaatggcatggaggaagacagcctcaggagagtgagatgatacatatgggagcccccatggtccaactgacgactctttgctgtatttttccagggcgagagatggtggggcccacgctgcccggatacccaccccacatccccaccagcggacagggcagctatgcctcctctgccatcgcaggcatggtggcaggtaaggagagggccggcaggaaggggagcactgcaaagaggaagtattggagcaaggtgggacacaaggagcaagaggcatactgtgccctattcatagacttcccaaagggcattgaaggatggaccaaagagggcatctccttgtaaatgcctggagacgatgtcccagtgcagtcctgactccctatttaacttgccccagctcggcctccttcttcccaggcctgctacattaccctccatgatgaaaagggaggggctgagacaggtctgtgttcaaatccaagctccaccacttcttccagtgaatcagtgagcataaatggagagcactctaagggccccaaaacactgtgagtggaagatgaaccctaccctcaagcagtgctggtctcccagtgatttaactctgatgaatcccagtttacccgttctgtaaaatctgaatctgaagggtattgatgatgatgatgatgatgatgacgatgacgatgatgatgatgaaatatatgcttcacatctctctctcaagcctgcatggataggacccgggttctaggtactctaagagtactatagaggatgaaatgagcctggagtagctctccatcctcatttggactgttctggaacctgcctgccagtcatttgggtttctttgtctgccagtcatcatccaatgatgattcaagatgacaaggtctggacaaatgaagataatgggagtttccttgggcaagtctcaattttttaggagccatgtagggaagactttgggatggatgagacataattgagccattgtcactggtcaaaaaggcctgggacctggagtttctggaaagagctctgaacacaaggcatctgtgacccccatgccagccctaggccagcctctctggctgtgaccccagagacttggcgtatttacctaggcctgcttcccttccttgccggcaggagttaatctttgccagccacccactctgggcaccctatgcagaggcaggtgggctgggatctcctgggcagagggaagggagggagagaaagagggagggagaaatgctctgtgctccctgggaacctgctgagctggcacttgttgctgcctggttaccgtggcgatgtgcttaatgcagcgttgaaaatacagaatactgactcctctgtccctcctggccccggactccctccctccctcccttcctcttctggagcgtgaaatgagattggtcaagataaaaaaggaaaagattcggttatttttttaagagtgtggataatggggcctctcaatcaaaatcccagtctccagtcggttccccccattccccttccaacccctccaccttcccctgccgcctgcttagaggaggaggaagaaacataaagcacaaggcttttctcttaattatgaatcattccctgagggcaggcccagggcaaggggttcctggggcccagagtctgacctgtgaggtagctagaaggcttgagcctctcatcaaagtcccccaggttgtttccagaaagaatcctgagtgggttctgtgaaaaagaaaaaaaatagcacaactaggacactgactgcaagtgaaatccacaaaggagggaccttgccctacacagttgggctcccagtgagttccatgaaaatcagttttagaaaatgcaatactatttaaatgaatcacttggttcctaggaatggcactgtgcaaatgaattcttaaggaaatttttttgtggaaaaattctatgtccgtctcttaccactgcttgcaatctcccagttggttgaatggggactcctgcaattaaagtgaataaactttcatcgaacacctactgcattcatgttaggtacatgataaatgcttaaagcaaggcatgccaaagacattcatcaatcaattgtgaaaggaaggaagtgatcacttattatgtacttttgcatgtctagccattcaaatatgtataactttatttctaattttaccctgaccataagactaagaggctaatactatcccagttttatggataaggaaactgaagcaaaagcaaagtggtgtgctcagggtcataatcatactaagtggctgagttatgcaaacacggatttttcaatttcaagtctaaagctctttcctctacaccatactgcctcctaccataccagaaataaagacacaagctgcaagagaggagcacaggaaaagggctaggacagatttcccttgtctattcaccttctgtttctattttattttattttattttattttattttattttattttattttatattttattttattttatttttttattttattttattttattttattttttgttttgactccattaacagtcaatgattctcaaccagttctagagcagaaccagcagctccagacacatggatccatccagtcatctatctttccactcattcatcttcccatacatttttccacgcatccatgcattttcccatctatccttctatctttcatcatccatcccgtcatcctccacctttccaccgatccttccatctttccatccatctttccttttttttttttttttttggagacggagtcttgctctgttgcccaggctggagtgtagtggtgtgatcttagctcactgcaacctctgcctcccgggttcaagtgattctcctgcctcagcctccccactagctgtcactacagggacccaccaccacacctggctaatttttatatttttggtagagacggagtttcaccatgttggccaggctggtctcgaactcctggcctcaggcaatctgcccgccttggcctcccaaagtgttgggattacaggtgtgagtcactgtgcctggtccctccatccatcttttaattcatctgtcttttcagttatctatcatccatctttccatccatccatctttccatcaatccttttatttttccatccatattcattcgtccattcatcttttcatagaactatcctttaatctgtctttccatctatcctttcatcatccattcttccacccatccctcctctcctatatccatcttttcatccccttttcaatctattcctccattaatctatacatctttctatatatacatccttttatctgtccatctttccatccatcttttcacccatccatcctttcatcatcaatccttccatcattcacactttcattcatccttccatccttccatccatttaccactttttcacttaacaaatactggttgaaggtctactgtataggatgctggggatacagcagtgaataagtcagattcctttattcctggagcttataacctaatggtgaagacaaatggacaataaataagtcaatgaatgaacataataatttattgtctgtgaagacaataaaatgggatgatgtaataaagagccacagggagaggagataactactttagattgggctgtcaggggaggcctctctgagaaggtgttcaaagtgaccattcaagtgataaactggggcagaccatccctggaccaaagaacagcaagggcaaaggacctaaggcaggaactagtttagcatggtagcacaaaattgtagtggctgggtcgagttttaaaaggctactctgatttctaggaaaatgaattgtacatagtcaagagagaaagcacaaagaccagttaggggacagttgcagtagttcttgcaagagatgacagtggcttgagttagggaattagcagtgaaggagggaaaaagagaccctgaaaatatattttggttgcaaagccagcaaaccttgctggtagattggctgttgggatgagaaaatagaggaaacaagaatcatttgtaggtttggggcatggatgatggtggcaagtatatatatggcagaccaggaggggaagtgatgtagtagatggcaagtggaaatcaagagttttttgggccgtgttatgattgagatgcctactaaatgtccagttttaataagtcagcaggtacatcatgtgtgtctgaagccaggaaagaatcctgactagagtataaatttcagccattgcacaaagctgtcatttaatgacaagactactagaaaccaagcctggggttcttcaacaatttagagctctaacagagaaggaacagcaaggagaatgagtaggaaagacaactgagttacaaagcaaacagaagactgggcatcacaaacccaaaggcatgagacagggatgagctaaaaggtcaagggaattgaggatatagaagtgaccattggtatgatggagttagagactgtggggacttgaggggatcagagttggcctgataggaagggataagaaggtgaaggcagagaccatggggcagagaaaggcactggtagctagagaggaatgtggggataggaagaggattttttaaagacagaagatagcagaatatgtttgcagggtgaagggagagactgatgaaacagaaaacgggatcattggagcggccaaatccttggaaaggtgagtagggtgggatgcagagcaaagaggcagggttggcctttcatcggggcagagacgtttcatctgctgtgactgcaagcaggtaggcacatctgatgacgggaagatgccacacccaggtgtgtaccacctaccgagctccatcccctgccccaggttccatgtgactgaggtactcggtaaatggtagttaaatacataaataagtgggtgagtgagtgaatgcatgaatgagtgacaaaatgagagggtaaacacatcatgttttccacctctctcccttgtcctctagagctcactgtgtttgccattgggtagggtgtggtaaaaggtgagagggcccttgctgtgtggccagtagagaatcggctgaaacccgggagacctgagttaaacaggaggcagttggcactgggagatgcaagagagagtgccattgtggaaggacggggccagggttctagttctggctttcactgaatatgtgaccttggccaaatgtctttacttccctatgtcacagctgtgttatctgttaaacagatgtttagagtagattatttcttagtttttcatctgttaaatagatgtttcgattagattatttcttaggtttttttttctttgcttttttacttctttacccccttcctttttttacccatgttttttgcttgatttacgttagacttagtctctgcccctaaggaactttcttactgtgttctcagtccgtcattgacttcctagacaaggagaggatccagtagcctttctctgctttaggctgctcctcttcatctctcttcttcctgtataaatgcctacttgtctggcaataaagcagctcccactaaccccaacccaggccttaagactggttggatgactgatttaagcctccattgagctttattttcgcacctgtttaatgggaaaataataaaagcttagatttattgagcactccctgtatatttgaagcatggtgctaagcatttaatacatattttgtcatttaattctcattaaaccaaatgagatagggataattatttggcccattttacagataaggaaaccaaggttcacctgtaagtcactcactcagagaggctaagtgacttgtccaagtttacataaccaggaaatgggaagtaaggatttgactctagacaggtcagctccagagtcagggagtttcgagcaacccctccaaagagtctggggaaggagactcagaaccacatagctcccaatcgtaggtgagtttctgaaaggctgggtggacattcattgagtctcagggttggcaggaatctagctttgtaaatggaattatcgcataagtgaataaagggattatctgcaatttggagtcaagagccctaaggtcgagttctactctgacatttaacaacagtgtgatttgaggcaaactgcttaatcatgctgcactccagtttccttttctataaattggtagtatccatgagtacctcatggggtagtcttgagaataaaagatcataatgtatgggaaagtgctttacaaactttaagctctttaccaagcaccggtagtagctgtggtgatcagtttgactttgtttttgttatgtaagggaattcttaagtaatttcttcggtaaataattcctttggaaaactcaagaatccattaacagaaggaggtgatctgatttactttgtgtaaatttatacgttgagtttgcttaaagcggcagactcaggatggaacaacaaactactccaagtcccaggacacagcttcctgagggtgtgtgccctctggggctctccctcctctcccatccttaaccctcacacctcccctcagccccccatgcacacaaacacacacactcatacctagcgaggctaaaaggttcatatatatggatgtcctctttggcccctaaccccatacccctgctgtggggccctcccagaagagcccttctccagaaggtccaggcagcagaaggagcagttagtccctgggccctacactcacagcacagtttcccagctccaccaaaccctccagctctgggagcttccgcagatcccagaggctcagtttcttcatctggaaaatgggggtagttataacatctaccttctgggcctcctgggagggctgtagtatgtcaagccagtgcctccagtacctacggaaaaggacactgccccaaattttccagatcgatgggttccaaaagggatgacagagggaccttctgagctccattgtccctgccgtggctccaactgtctccccaaccattcctgagcttgcccattgccagccctgcagaccttcccacaccccagccctgcattgatgcccttcacctcacaggcctctcccctgtgtgcctccaacaggaagtgaatactctggcaatgcctatggccacaccccctactcctcctacagcgaggcctggcgcttccccaactccagcttgctgagtaagtccctggggctgcccaggcctctgctgggcaggatggatggagtggtggggggcaagggtgggtcaaaggttacctgaaagctgggagtcctcagattatacagagggcctgggagatggtgctgtttgtgatggaagaaggcagcaggagggcagtgtacctggttgtttggggaaagagggcagaagtccagaggcttccaggcattcgtttccctcctgcttctcaagcccatgtcttttaaatctttgttttgtgtaagattcagggctcaggccttgaaggggaggacaagggaggacttgagaaaagcctaagagaggacctcctgcctccacggcttacagtcccacagtgcagacactgacgcagggcacccgccagaatgtaactgccctccttcctgggagccagtttcaagaatgccatcctgttgcccccattaaccatctaagtggctcagaaatactcatgattcagcaccaaacccttaaacagaaatcttttgttccaccacattccccatatttagcctgagatgaagacagtattcagggtcgaggtccagagagtgagcttcagcgagcttccaggcttctcttcacccctctcttgtcctggggtcctgaactgggaagagaagcttttcagcaaagcaaaaccccaccaatggggggacttgagggatcccactagagcctccctgagtggtggccttgggtgtatcagagcaaaccggagccagacagaagcagtgatccaaggatggccaaccccacaggcaccattgcaggctaggaaccatccattccccaagaccccctctcctcccattacctctttgtattccagaaataacttgaaaggtggcagacctgggccctgtttgccagatgagttcaactccaacccagctttccattcaatttagccagaaaagacgagggcaatgagacatgccagggttcaggcaccttcccactgagcctccccaggctgcccatcctgcaggtgtgcagagcctcaccttaagggccgtcaagcccagatcccctttgacccctcagcagtctaatctccctgggtcttaagaaagaagactctctgtcctggcactgtttgggcaaggctagggaggatcccaatgacctctcagtgcacttgattctttggggttccacatgcaattgttttctattgccctctccctattgcaacgagggtgttgaaggtcaaagcagccatagggggaaggggcaagaagccactgttctcattctggccagaaactcaaaggtgaggccagagaaggaggaaatagggctggagaggagttaatcttcgatgatcagataggccagagaaatgaatgattaacttgtgttgtcttaaaggtcagcagatgcagggaaggctatggtgcaattttcctttctgaccagcagtgttgttgttatttttttttaatgtgtccaggttccccatattattacagttccacatcaaggccgagtgcaccgcccaccactgccacggcctttgaccatctgtagttgccatggggacagtgggagcgactgagcaacaggaggactcagcctgggacaggccccagagagtcacacaaaggaatctttatttattacatgaaaaataaccacaagtccagcattgcggcacactccctgtgtggttaatttaatgaaccatgaaagacaggatgaccttggacaaggccaaactgtcctccaagactccttaatgaggggcaggagtcccagggaaagagaaccatgccatgctgaaaaagacaaaattgaagaagaaatgtagcccccagccggtacccaccaaaggagagaagaagcaatagccgaggaacttggggggatggcgaatggttcctgcccgggcccaaggggtgcacagggcacctccatggctccattattaacacaactctagcaattatggaccataagcacttccctccagcccacaagtcacagcctggtgccgaggctctcctcaccagccacccagggagtcacctccctcagcctcccgcctgccccacacggaggctctggctgtcctctttctccactccatttgcttggctctttctacacctccctcttgggcatgggctgagggctggagcgagtccctcagaaattccaccaggctgtcagctgacctcttttgcctgctgctgtgaaggtatagcaccaccccaggtcctcctgcagtgcggcatccccttggcagctgccgtcagccaggccagccccagggagcttaaaacagacattccacagggcctgggcccctgggaggtgaggtgtggtgtgcggcttcacccagggcagaacaaggcagaatcgcaggaaacccgcttccccttcctgacagctcctgccaagccaaatgtgcttcctgcagctcacgcccaccagctactgaagggacccaaggcaccccctgaagccagcgatagagggtccctctctgctccccagcagctcctgcccccaaggcctgactgtatatactgtaaatgaaactttgtttgggtcaagcttccttctttctaacccccagactttggcctctgagtgaaatgtctctctttgccctgtggggcttctctccttgatgcttctttctttttttaaagacaacctgccattaccacatgactcaataaaccattgctcttcatctcaggctttggggttggctggggaaggaggcatcccggggctgggctttctcccaagaacatcagagctgagtagccgacaaactcactttggggccgtgggctggaagggaccatctgatgccccagagctctggcttggccttctccctctgcctttaattcacgttgaacgctgggtacctcactcatcccaagttcttcaacactgagcaaatgcaaggatagcacagtactgagccaaccatagactccccacaaggagttgctgttgttattaacaggaagccagagaatcagcagggtgggttagtgagggatccgggaatagctgtgactggagcctgcataaacagctctgaagggagagagaagactgggctctcttgtgtgccaggcacagtatggaaggcttcatataagttaagctgaaattagccctgttttacatacagcttcattttacatatgaggaaactgaggctttgaaaaaaatgagatgtcttgtccaagatgaaaagtagtagattcaaccaagtcctcttactctaagcccaacgcttttacccaaaaccccagagtcctcatcagggatgccaaatggttctagacccagtggaggttctggagctgccactggggatttaatttcttttgatttgctaaagatttgacctgactgaatggagaggtagagtgtagtgtggccaggacaaggtgagggaggctgtagagacttagcactttaggccaaccacctccaggaaatctgggaaatgcaatgtgacagctcgggctctgcactccagggggctgtctggtgtccacatggaccttctccatgtgggacacagctggaacaagggggcaggggcctgcagctgggatgcccaggtgaatatgggcagctggacaaacaacactgggattgagtcagatagaaggggcccaaggactccagggctgggaggacagaggctgggagagagggctcttacctccttaggcctcccaaagagcggttagggatgctgccatggatggcatggcagggggaaccctcctggaagaaaatccatctcttctgaagggatctgagatgcggctggtttttcaatggcagaacttccctctgcagcgcgactccgaatccatgacatctgagagtcttcctgaccacaaacctctgggatcccgagggctccctacccaagaatcactttgagcacagcatcccaaggagcccatagagcgatcccttgcattcacagccacagcccctctggggacactctgtacccccggcagaccctttccaactcacaaccaataaaggggcttgggctgtgctttgactaaggtga

SEQ ID NO: 76 - DNA, 59542 bp, Mus musculus
  source 1..59542: mol_type = genomic DNA; note = Mus musculus strain C57BL/6J
agaacagctgtcagaaaggtagcccacttggtgacttggaatgggtggaaggattcctgcgatctgacttgtgctgttctaggctggatcacagggtcccagccaggggagggcattcctctttgctgagctgcttactctccatctctggcagggctatattcccaccatggggtctgacctcattctagccacaccctggcttccagaaaccttcttcctagtgggagaatggtaggtgctgggaagagggaggaaccaggttggaatgagcagaattgccatcacctaatacaaggccagggtcactacagattatttggtccagccagcagggtgcccttggccacaatagtgcctatagactcagttttctcattttcaaagcagattacaaaaaagttctagctcattgtttgtaattttaaaaactattgctagtcggggggtgggggggatgagtttcctctctagctcttgtataacttctttagtctttcttccttttctgcttccagttaggatttttcttattcagctccaggagcattgggctcccctcaagcagctaaggtagatgctgccaaggggctataaaatgggcaaaagaccaagggatgtgtgccaggtcacatctctaaccttccccaactggacaaatgccacaggtggctttttccaaactgccttttcagcccgtggcccctttcctctcatctgccaggacctgcatttctatttctgttttgaaagcctcagggaagtggaccagaataattaatgattgattcttaggcacagccaccaggaggccccagggcaggctgctggccatttccccaaaatgtgaggctagagaagaaattttaaggccatggcaggactgggcttgttcctgggggagatctgtgagaagatgcacatctactctctgcaaactaaagccatgaagtttgcagactgaacaagggccaggacgcaggccctctgtttcgctgggatctctgcttccttctttgtagtgattcccttcacagcagtccatcaccaacatctacacgcacaagtgcatgcttactggcctctttatcttgaggttctcacccaggaggtttttgaaaaactcatcatgctttgggggaaagatgaaaggaaccgatgtctactgaaaaatgctagaggagttttaactctgcccttcttgggtgtattgcctctgcctttgttgtctaataataattaacttttgtacctagctggttttcaaagggctttcacatttgtaagcctattcatcctcacaacaaagtgcaaggtaggcccaccctttctctctacttcactgcctctcgaatcccacagaagaggaaacaggttcagagaaggcatgctcccattttacacaatcaggtctggaacacgcactcacccaacacgagcagagagcagtcttgttcctaaagaatgcatcttggtgcaggaacgttcattaggtaggaggagataggttgttagcttggggaaccttatgccatgactgtcccccaggaagattgtgcaggcaaccttctgagccttcatagtaaaggggaagaggaggttcctggcctcctctgctgaggtatttggggcaccactaagagtatactggagaaagtacaaggggtacatcacctaagccagtgggcaccaggaccccacccttgtaatgagccacctaactccatgtacagctgaaaccctgggctacttacgaagaagtccaaaccactcagctctagtcaggtaatatgactaaatcaaccgcgtttgccaggacagccccagttttagtgctgaaaacctcacaaccaggagtcttcagaaagcccattccactactatcagagccataatgccaaaagaccatttttgaaagttccccagatcaatgtttgattacagccccagaatgttacgtaaaccaaaaagttaccaactgttgcataggactgtcacattcccctggaatgaatggaaggttaagcctaaaggaatctttgtttccacaaatactgaaatagtggccaaatttctcaaatttaaaaaattttaaagccaatcagcattgttcattatggcatttaaatactggtaacaaattaaattttcttggaaaaacagaatataaaacttgtaactgaagaagaaataggggaagaaaaaaaaaagcccagtgctagtggcacatgcctttaatcccagctttcaggaggcagaggcaggtagatctctgagttcaaagccagcctggtctacagagtgagttccaggacatccaggactatatagataaatcttgtcttaccccccaccccccacaaaacaaaacaaaacaccccaaaacaaataaaaaaaaacttgtaactggatttagactacaggttgctgattgataaccttgggggaaaagctttatgtgtgctaagctgaagaaaaggtgggggtagggtgggggtgggcagtattagtattttaataggcactctttaatttcttactgagtggaaagtcaatatgtaaatataattcgaaattttaactaaagtcaaagggagggttgattcttaaaagtttggagaacaggttttagtaaatcctgtctttcaaacttcttctttcctaaaagaggagactggccccagagatgctgcatttaggtacctgggtattgtttaatgacattcctgcttctgcctaggttgcagaaaaccaggaagtgcggaggaaccaggctctgatttctagttgtaattataaaacaaggcatggtgttcttactactggttggttctagaagatcaaccctgctcagtgtccttctggctatctatgtcacctgcagcctgaagcagggtgccctggaggcaagtgggccagttcttccttgataagcagctgcgtgcaggtgcacattacagtctcatactagaatattgtaataacttgctgttggtctaaatatggaagaaaataagacttttctgttggttagtaaaagcaagtattggttaaaataggtttattagctttagtggttattagacccttggcttaggtagaacttctgaggttttcaaaactgtgtagacaaggtatcttagacagctcatagggtctttaggtcctatcctgtgttctctgccacaaagaatcttctctccccaggaggatattatggtagagtcaggggatctggacctgccaaagtacagagcacccttaagtaacaatacggaagcatttaaaacaataacacactactagatgctttcgtttagagtcctttaatgatgtggaggatatttatacacattctcttttccacagaatgactacatttttcctaaattgagatacaagaagttgtgagttttcatacacagatgtgtgcatgcatctgcctgaccagctcagtgtcctctgcccctgtcctggcttcctcctcattccagctctttcttctacccctcaaggcagaacagtccctcctgcccaacagggctgtcctctcagctgtaatctgaaatccagagatctagtctgagattgcccgtggggaaagggggcatgcctcactggcctgtagattctccaggacatttgctcccacatactcacagtgtccccttgtacggtgattcggaatcaaagaggataactagaaagatagaagtggcagccagtgcttcctcttactccttcccaaagggtgccttctacatcacagaagccattgctccctgtatccttgccacaggtcagcccaaactacccttttctaaggcagaggatgaagtgaaatctaagcagtaaggcttcctttaaactcatcttccaaggtcctcactgcaaagaatgagaacaagaactgaattggtgcctgtgtgtgtttgagaagagagaaaagtccctatggccttagtagtagccaaccgctttccttaccctagtcctggctaagcctctatggcccaaagaaaatggtttggtgttaatctgctctagagagggtcacatcagcaagtaaagccatcttgctgcagcctcatgggcaaagacccacaccctcagaccaaagttctcactcagaaaagaaaaggtccctttcccatgagcaggggaagagaagggttgaaggttgtcatagagtgaccttgagctcactctggtggtcagcgatccaagagtttccagagaaccacatccccagaccccaggctttcatctcccactccccagtacttcctggcctgctgagttaggattctgtggccgccctctcttccctcctccagaaacagaagctccagcgaatgtttctaactcctgagtccactcagccatgtcccccttgcaaaatcccccccttccctcacccccctgcacccagccagccaatccgaggcctgagagcctcgccagacacatctcccagggcctcggcgggataaaactggctggcgatgccaggtggatgggagcaaacttcagaaggaagagacgcctgggccttgggcaccctcaggggcagacccaggcagaaagggcctgaggccagccggccaggtatgtcacctaggggctagaagggagctggaaacagctgggtaagaagactagcagcctttttcctctcaagttaagtgggatgaggtagtatctatggagggacagggctggagtttggggcttccttggtgcacccctaaccgtggatcctcccaacaggcacatttgctaggccaggctgaggttggcctcacttcaccccactctggacactcagtaggagtcaaaagacctggcttggggaggggatgtgggtttgaggcctcgattctcatgcccttcgccctgggtctatatgcagggtagctgcgtggcagccagagctgccaggacctgcgtaggaaagctgcgagtgtccctcagtctgtgagcgactccccggcgatgcctcacaactcgatcagatccggtaaggaccgcggaggggccaggacccccgagccctctcgccacccgtgcattgctgtgtgtgctgtgtgcgcttgggcgggtagggtgagaaaactctaagctggcaggacccacctgtgtggggacatagttgggggtgcctagggcctggatctccattgcctcgctgctctccagttcttgggtccccctctgttcgactctgctgtccttccccggccttggcttctgagaactacaggaagcagtgagggattatttgtggggtcacaagggctgtccttttgcacagtctattagggtgaacatcctgtacgctcacaggccttaggccaagtagattctagtcttgctgcgaccagagacccttgatctctgggtgctcctagttcttcccagggctcccctacggctccataaaccgccctccacctccattcatctctacgcaagggaaaaggagtctggggtctgtggatctggggatctgggatcggtggcgcactagattctttcctaccaggtttaagccaggcgggggcccaagatcagggcttccactagcacagactaatcgcgaaaagatccccattttccttcccacctgcgccccagctctgggccttcagagctcctgagcttcctgcagccgtgcccgatctgctcactcgcagcccgggccggggcgtacggagggaaggacttctagagtgcgagtgcggcggacgcccgccacaaagtcgcacggtcagggaggacagcgggcggaggcgcgcttcggcctgcggtgatggatggagccaggtcgggagcgaggaaagcgatttatggggccagggcgcatcgtgatcgatttgggccggccgagtgagaggaaatcaatatttcagatgaattctctgcaaatatgaagtcgcgcttagcaaacgggacatttgttataataaggagggtcggatcccgcgcgccgcttggctgagatctctatttagcctccagggtcggacagtgtggagcagtctccgtttggagggcccacaccgcactggaagggccaccgccaaccctcctacccccaggggcgcggaaaggtttcctaaccatttctctgtgaagaagtggtaaagcagtggggggttcagcaggatgttcactccccaggaaagtggaatcccagcggtcttagctgtcctggctgacttgggggcagcttcagggactgcgacgtggagaagtcccagctcttccctggtgccaccaatgaagctgcccggttctcctgttctgtcaggtccctagtgcgcccctttgccacgttctaagggcagggcaaaattacctttagtcaaactagcatatgcatcggccggccccgggagctgggaggttttccagcgaggtctataacttccctagctaggctccctccgcccctcaatccccccctgttactctgctttgacctcctcttgacgagagtggggactcacagaccttaaaatcatgagaatgagcgagactcttcttaaatgctgctaaagaaaaaaagagtgtcagaatttctcctgattggcttgttttcgttctaaaaacactcactagaataatcaaaaataaaagactaaaggcacaatgtacttatatccttaatcaacaactgccccagttgctgaaagaaaggcactttttcctaccagctcggatgagatcactcttggggttgagtggctcctcggctgtctcctgccctgccaggtaattttctgtctgaggaagctgaaggagcctcttctccctcctcctaacaaaagaagaaataaaaccgcaaaagagggactttctacatcaatacactgatttttaaaaggatgaaaatacctaaaggagtccctatagttcaaatctgtcccgcatttctctcctggtccctgtgttgagccggagatgctctttctatttatttgatgccctgtcccatatttagagaggaattcgtagctagcccctcttggctttttgtttgtttgtttgtttttgtcgttttgaaaacccattctttgggttcagagactggtccacaagtccgttgtcatcccaatttctgtagtgatgccacatggagtctgcgggtgtgaagttttctgtggcgcatacaccagagcgcaagcaacctctctttggttttcgccaaagccaggccgcctagtatcccctggtacagccatcccagccgcctcagcaaaagtttcctttgcactggggcctgggcggaggcagctcacccttcaccttccaaccttccactcatccccgggctaatctagtcttgtagaaaggtctcaacatctttacagctttattctcaagaatggttcgtgtttcagtgaattattttgacatctgtaggtcagcattgggctgagcggtctgtaaaccagcagaatttttttttttttttttttttttttttgttgcaccggggacaaacttctctaaaagcagaaatttaaaaaaaaaatattttaaaaagatgcgtgagaatttattggtgccacttaaatattaaaatgtaaataataatgtttctatgaccaagagagtgtggcaaaaagcaagcagattgtcattaatagaaacactgtaaaacctgcggagaacctgtccctccatacattctgaaaaacctgtcattctagcagcagatgagaagatcaaagaacgcatttgatttgcctgccatcaaacacctaaaaccgggcgcctcctgagaaagagggggaagttcagccggaaaagatctatttcttgccaggttccttgctcggctttgaggggatgaggaggagagtttcttgggaggagaactggtgtccagaaatataaagagttattggggttcctcaattcatctttgtttcaggacagtctatcttcccaccgtctgcaagttaatttggagataatttagttgccttgtgaattagttttaagataagtatcttttcaggcgttgtcactttaattgccccgctgattgataagaagtaattatttctaattgacacttttttgatgtctattggaagcatttatttgagacctttttaaaataaaaggaaagttaattaattttatcaatctatatccaaaaggactttgccattttttttctgaacagaacaaaggaaataaatgaaacaaaataaaaatcaataccatggaattttaattattaagaattattttggttcaaaggagatcatctaatactacagcaaatcaaaacattttatgacagccccaaatctccaacttcagcaagtgcatctatttagggcacacactttccataaatatattcattagcccgttctgcatctacttcatttgggtctggttccctctgctttgtagttgtgtgtttgctgttgttgttgttttgtcaaattaatgaaacttggaatgctctgaacagataaaatcagtttgttttctgttgttgttaagagccaatttaagtatgatttactatcagtcgttcttgctctctgtaattgttgatggagctgggtgtaaaggtgaaactttacttatggtgggtgacaatgctttcttatacctaaacctttggagtaaacagtttaatcattgaccatcagaatattttactgtgagagagaaagaggcaggaaaaaagaaaaggaaatgaaagtgaaaagaaaaggggatggggtggaggggaggagaaggggggatagtacagcagttacctgggaaagaagggggtggggggatagaagttccgcatttactcagaaaagaactggataagagcagaggggaggaggaggctagggaagaaggcatttgcttgggaaagaaggcagcccagttcggtgggggtctaggatctttgagttaaaaaaaaatggaaatcctaatttcagaacacattcttttgaacatgacatctccaccacagcccctgagcttaagatccccctttttctatgcttaaaaagaagcaaactctgggcagccaacctgttaggatactgggcatctagttatcaaagttttcatttgaaaaaaaaaatctatgaaaagaaatcagtaaaatatacactgttttctagggaaatacaaaaagattggatgctgtttttattttgttcttaaagctccatctgtttgcctacgagcacatctcatgggcacacttgtgacttattgacataagaagatattcctgaataaacccaacacactctttccctcccttcctcacacacacacacacacacacacacacacacacacacacacaccacacgcgcgcgtgcgcaaacacacatgcacacaaaattgtacacttcaggaagagaggaactgattataatcatgtaaaatatgctcatgtcaagttaacttcagccagtgtctttttcaataatttatattaaaaaaatcaaatcttgtctacttttaattctgtttctccaagattatgtctagctgcaagaatgaggaaatgtttcaaatgaaaatgaaatctacaacgttcaaacagcagataatatcacataccaaccctactattagtgaaactggaaaaatatataaataatgcaaaaaaatcagcaagggagagtttagtaatggaaaattcccgtgcaattaaatgaaacagtaatttagtggagatatgcttgaatggattagcatttattaattggctttcataaaaacaatgtgtgtgtgcgttcacacatgcccacacacaaggtagtgtagaaattatagattccctgcaggaaaagttgctcaaatgttcatatcaaattatgtccttatcacattttctcttttgtgtgtgtgaaaaatttctgttcttttgctggcaagtttcacctgcacatacagagcttgcagtacacagagcacatagagagcttgtagtaaggggaacgaagctgctcaccctctttttattagtacacttctaaacatgaaaccatgtgtagttgatttcactttgcttagggacataggaaccaggtctaaaaaggtgacctgcctgctggggtaggggtggggctgagggtgggatagctaaccaaggtagagaaggtcgctttgtggttttgggcctcacccaggctgcctgagcatcctccctggctctcaggcaggaacaataatttgtaatatcaaggagcttgccagtgttgactggtacaatgtttactttctttcaccagttgctctgtcttcattcagggctgagcattttaaagccactcagtccaaggagggctggagttctcagctgagctttgaggctttgagttttgagaatctgagaataagagagccaaaagaaagaacgaacacacacacacacacacacacacacacacacacacacacacacgttggggtagggagagagagagagagagagagagagagagagagagagagagagaaagagagaaagagagagagagttttaaaaggaggaagcagggaatgaatccccattcaaggctgaggaatattttgcccttagttgatacactggtctaagcttccccacctgagctctgagcgtctccttccttcagaggtagaacttcagggtctaaagcacgtaccccacataccacggatgtttctttctggagtcaggtggtagtgccttacttaacccaggttcctttgggagaagggagtctaaagcatacgaaactgttcaaaggctgtttctaaggcaatgctagatgggtcattttgaggtgaaaagtacaaagagcagctgggatctggaaagctgagccaatcccatcttactcagcccactagagcaatcctggaatggactacctgaagccaagcaggtgggaggaggctttaaacctttgggtttttaatctgcactaactttacagtacacctgtgaggagagacgattatttttttcatgtacacaagctagtaggccttcttgactttccaaaagcctttcagtccactcccatggcttcatagggagttgaaaagaaaatctttatcttaccggggtcagaaaacaaatttttttcatgtcaaggtgtttgggtaaactgtccattcatgtcactgagcaccagttttgcctggactgaagatcctgaaggatctgggtggaaaccagcaagaatctttgttccaagataatggtagagaagttcgggtgtccctcaggaactctcaggttaatttctaaggatcttactccatagtccccaatggcatgtaagatgccaagtatgtctaggcctgtctttgcctccctaaccctcccctgtccagcaatgctgcttttagggccaaagaagaaccagacccaagagccaagctcaccctggcacttcctgccaggaagctgagattctcatctctgagggctgttataggtgtggtattgtactgccagcaggcacatccatcacctcacttaactctccggacttggcctgactggcatgcatggatgtttctatagaagtggaaggaattcagccaaagaggcaaacctcaatcactccctttccaccctaaatggagctcatcagaactcagtagtactagatggatggttcacacttgcacacttgatagaaactcaaccagaaggctgagtaggaaggctgcagtgcctgtgcccgcaggcactgctagagccttcactctgtcagcttgttctcctgatccacatcccccagtctctagggattaaataaaatgtgtttgtctgcagcatggttgtatgtctctccatttgtgaagagaggccagtgttttatttctctgggcatctcttgagagttgctgtagggagaaggaggtatcaaacattagccaatacaaagggaggggccttttaaaacatttctccaaaactatcaccacacctccatccataccagaagaagtgccatcctttggcaccttagaaagttcaaagctcacaggaaagttaattcccttccttggcatctcaaaaccacatttagtctgagggcttgggtttatttcaggaataacaagcaagtgcatggaatagaaatagctttggtgtatccaggaaggcttccccattttgccaggggccagtactagctatccaatctcctggtcatgtaaaagccaggggtggtggaggtgctgggacgctgggtgcctgaacactgggctctagaatgctgggtgccaggcactttctccaagtttagtttttcttcctctgcagcttcctcagggtctgactctcaggggatcaaagccagacttcagctcctttgaagcctctacagaggttcccttataagtcagctcaaaatggggttcattttaaggtcctcatttagctgctgagctggctatgaaaaagcatagtgatggtttggcttaagcagagaaactgaaagaaagtatatcccccatttttagctcctaccctttctctctccctctctcctcctcccaccccctcttgctctttctgtcttcagccacaatgaagggttttctctttttcacttgtttttctaagtggccttggagtgacctggcagttagtgttaattactctgctgggacatattgtcactgtcagaataggacgggagactggtctggctgaatgatgcatctaagaaggaaatggcttaatctgctgtcatcctgtgaattgtgtgtttggacacacccaagcctctgtttgtgttgtaatttttatttttagtgtccctaacatctgaggaagaccagcagaactattatccctgggataagctcagggcctgagaggtgttaagagggtgagggacttccaaaatggctgtgaaaccagtgttatatcccagcatggaccaccaaagaccttgttctgcaagcaggagggggctaagccctggaagctttgttcttgacctggggctggttgttgttttctgtctgcgtgaccttagacaagtcagttgtctctttggggttgattattttatctgtatgaaactgtgggatactccagggtttctagaaaacagtgtatgtaaaactagtgtccaaatgaatatatatttatatattttcaaaagaaattattatcctcactatggcacttagtggctactcaagatctttctccttcctttctttctttctttctttctttctttctttctttctttctttctttctttctttctttctttctttctttctttctttctttcttccttccttcctccctccctccctccctccctccctccctccctccctccctccctccctctctctctctttctttccttctttccttctttccttctttccttctttccttctttctcttttactttatgtttttaagggacttaagtagcccaggtaacagaggatagcataaacttctctatctcttgcctctacttcctgaatgttaaaactgtaaccatgagccacgactactgaattataaggtgctggggatcaaacctgaggattcctgcatgccaggcaaacattctaaaactggaactgtatcattagccctagtttaaaaaacaacaacaacaaaaaacaaaacaaaacaaaacaaaaacaacaacaaaaactcttccatattatggtcaccaggggatggagtatccaggacacatttccagatatcctattgtctcagaagattatccagagctgaaactttgggttttttgggtagatttaggagagaccttttcatattgcaagtagacaaagctcatcccacagctgctgagataagtaaaagaaaacttgggaaatgtccactaaggtccccacagtcactgtgagctgttacactgtcttagttaaaaacctatttcacaacagaatctagtagtagcaggagcagtaagcttttaatagaatgaatgtggactttaggtcggaatccagagcattcaagggcagtggttctcaacctgtgggtcccaaccccttcagaaaacctctatctccaaaaatatttgcattacagttcatagcagtagaaaaattacagttacgaagtagcaacacaagtaattttatgattgggggtcacaccacaacatgagggactgtgttaaagggtcgcagcatgaggaaggtggagaacagctgctgtaggacttaatgaatctgccagagatctcttgtgggtttgcagttgcactgtgtatgcagctaagacaggacatgcaaacacttgccttagaaattcgtttttaaattcagatccataccacttagcttttaccaattaaaaatcgccggttttctgatttcttctcttctttccctctctccttctctctttgcctctgtcttctatttccctgctttgtgtactaataactcagtatcagcctgatggcaaagcctggttgacatttcagtcgtggtaactgagcactacttgcagacttcagctttgctccttcatcctaatgctgacttgattcttgagaagtctcaaaatggaggtggccattgtgggtgacctctccatactcacagactcatcttaacatgagtgtctgattttgattctgaggtagaagcaagggggagactgtaggcaagaaacaatgctagagtcaatctagaagcagctggaatctgagaggcagcagtttatttcagcttaactagcctacatgaagtgctgcctaccatattcagggctccacgccagggatgctaacacttgtggccagaacaaaaaaaaggtgagtggctgggcttccatcatgaagagttgagaggcaccaactcagggcaagaaagtagattcctgtgtatccttttaaagggaacagacccagagtaccagcactggcaatgagcagacaaaacagttcaggggcaggatgaagacaaacacagacagacaggtcatttgggagcaccaggaagctgaggtcatttgccttgaaccgctactagaaagaaacgacatcatcatggctgacatataaacctcctgtggccatctgtggtctggtggatcctagaagcattctgctccagagagatatcctgggattctggacaggaacagcaatctcccggagattcatctccatatggctggacaactcaaaatgaggcagaattataggtgtcagtatcatgaacagatgcgcatttctgcagagctgaaatgctaggctccatcagatgggaggggtcctctgcctgggaatacccgcggctcagcagcacatccgcgccagcccaggatgtactgttcagatttcatctctctagaagttgttctctgtatcatgcagtgtagacacaattgtctcagcctttcactgtttgcagactacttttttctgtttgtcgatctgccccacatagacagtatccaccttgagcccagagaacctaaggttcccgttggtagaggattaaaagggggtcttgaaaggctgcctttaggatcaggcacacccagctctgaagctcttctgactgtttatactgtgttcatggctgagttcaggagctgttgattttgtcagtggttgggacccactggtcctgcctcaaagcgttgatgttgtatgtgaagcacttgttgcctgtatctgaactattttcagcagacctaccatctcttgtaaagttttctacttttttcctcttcctcattttctcaagaaatcttactgctgtgattttatggctgtttgtagtctatttgcataggggtatttatctttatagctcctatactctaggcttgagctgtgtatgggtctgtcaggacactcaaacacaaacgccaagagcctcttagtatttaataccactaaatagtctaactgtcccggaagtgttaaggtcaagagagtcacagatgaggccctgtcatcacactgtgctgacaggagactgggcgtttgcacatctggatccaggtcctacagtcctgtgttagagcagggacgtcttcttaaaacccagagctttctcagtcactttgtggtacatcccaaagtgtggggagggtagattaagatgagagagagagacagggagagagagacagggagagagagagagagagagagagaaagagaaagagagagagagagatgtctgtggtcttttctgaatgtgcaggatttagaaaatggaagaaaaggcctccttcacaggctaaagtccaccgagagctgctgagacacacctagatgcacacacatcaacacacacacacacacacacacacacacacacacacacacacacacacacacgagtgcgcggctgaaactagagagaagtataaaggttcttgtgagctcatgcaagagcatggccagttctgagaatgagtgagtggcttcttaaattttgtagtctggacacctggccattttcagtttagttctctatctcatacatataccacatatactggcagatataagtttgcatacactaccttcttacacacataaacacactgggaataaaactttcaatgctttgaaattgccctagaactagaggtgataagtgggaaagagaaggccctctgttctcagagacttcgagagactcagatatgaaattacaggtgtgactggttatattctggttgaatccacagttgcaagaaagtgataacagacctagtggggatgtagactccaagctccctgggtctctgctccggattgtgagatcatttttgaatggggaaacagcccataccatcttggttttgtagtgtatggtttcagatctgaataagggaatatgctgtatccagccatgccctgtttccctgaccccaggaccttataaaattaaagaacatggatggtcatggaggttcagtagacattcttggattcagcattgttctcataagctgaggcacagggacaggtgatcatttgctggaggtcatggtggatcttccttgagctggatagttactagtggcaattttaaggacttattcctcccagagttcagccttttgtatcctgaggatgaggcattgagggcacattattcaggcaggacccactgctcagaagacactgccatccctaccattctgctttgctttagaattttggagcaattcttctccttggggcctttggcatctgtcccaaccccagtacacagctagctccaatcttccacaggtgtctattggccaaaacctgaagggaacagggagagttgacaaaacccatgaatatatgagaccatgcttgtttcaacacccacaagaatgctgtttatggttattgcaaacaatatggtttattcagtgaacaaatagttaccaacctcaaaagtctgtgattctcaaacaccattctcttgtaggtgagcagaggtgcacacccatacagcaaagcctgaagtgctagtaggaaatggcatttatagacaaaatgccttcaagtggttgctgtaagtttttctacctatgaccttctatgtctgctctttgggacccaggacctaggatctgattcgttagtcccattaaactcactgctccaaggtgtttgttgcagagcaatctgaccattctggcctaataatacatgtcagaaaggctggtattgctgcaaaggggcactgtctgatgtccacacagacattatgcttctctagctacatgaaataatgggactcacatgccttcctccatcaaagggcatctctcggatttgatttaacttttcctaattgtgcctcttctttccacatacatgatataattcatgtatgttcaacacttatggcacccagatgctttgaagcagtgtggtggctagtggagcagggcatcccattgctcagctttccaggcatgcacacactaaactatcattatatctgtccaagctgctgtggtctcattttctcatctcccttggtaaatacctgttttagcttcctttcccgtaactgtgataaaatatcctgatgaaagcaacttaaaggagaaagggtttgtttgcctcacattctattgtagggagatcaaggtggcaggtacttgatgcaagtcacatgacactcacaggcaagagcaaagagcgatgaacgcctgttactatgtagcctacattctctactcatacaatccagaatccaggcaatggtgccacttgtactgggtgggtgttccctcctcaattagtgtaatcaagatactggaatcctttcacaaacacaaggccactgtgttagacattccttattgaagctctcttcccaggtgattctgcattgtgtcaagttgacaaattcaaactgatcatcacaattcctgaagttaggacacctctccttgagatttcctctgaaggtcttgctatccctgaagataaccttctagaaacccatagatatggtttcttttgctaccctctgtaatgcacacatttctctggaaaggctcctagttccaaccctccattctcccatagtagcctcttactggctcatttctctgccagttcttataaaagcatctccatgcctcttcactctctaactctgactcctttccccttctgcattgttccctcagccacccatggcaagcttgcatccatcagcatcatctgttggttgcctttacctgatttttatattccctggctaagcaagtcctagtttttaattctaaattattttaagcaggattagcattaactggtcagttaaataagtaagtacttactaagcccttcagtgtggtgggcaatgaagttgggcttaatagcccttgctgggtcaggacaaagctatggggaacagcaacagcagcaggcctcatcctttccatgaagcattggggacagagagtctcagggccaccacaggcaatattcttaagcctggatacctctgccattatgctgacattccagaggcagaaaagcaaagtggactttcacctacagccaaagaaaggagaccttcagtcaaagcagaggcaaaatgctaagtaaggagggagggcggggctggggcttgtgggtgtagctaagcaaggagggagggcggggctggggcttgtgggtgtagctaagcaaggagggagggtagggctggggcttgtgggtgtagctgaggaagggctgaaggtgaagtctcactaggtagcccaagcagctgtgggggattctatgacgtgtgccctcctgaaggagctagcaatgggaagaggaaagagggatgaggtcctgcgaggctgtggggaacttaacaaagcctggctgagatagtccttctaggccgccttcatacaatctgcatacagagcttgtgcctgacctgttcgcagagcttcagtcctgcctgtttgacttcgtgattctgtgtttgccacttttcgtgtactttttcttctctcttgccagagtctgtcagactttgtgatgtttttattaagggaacagctatggcagtaagttttgatagctcaattattcacattatcaaaatgttttgatttctctcctctcctggccccattccagaaaaacttagcctggtgattttccaaaattatctcggattcctgtgtgggcttccttttaatccaatcactaacagttttctgtttaagtcaagtgcccggtgggttgaggactccccaacactgtttctgtacacaagcccaggtttcagcaaattagttactgtttacaaaacacacacgtgtacattctcacttggggacctttgcccatttggtgccagactctggtcaccatcccacctctcacaaccttgctcaagttccaccccttccaatgacactctctcagatacctgaaagctttagtgaccatcccatctagcttccctctcttcaggactcagcgccttcttttagctttttattatagtgtcctctctctgagatagataaaagttaaaatcccttcaaagcccagtgcattgtccagaatcctctgaggagtgagacccggtaggtaacatctgtgtgggtcacttccgcttacttccccaataacatattttattgtttgagtgactgactgaagtttttcagtgtgaagcatgcctgattctttccacatgatatgatgtaattacgtctcaattttctttattataaatgacaaccaggaccctgaagaaacaaggagtgtagccttctggagaacctgtggcagctaccaaagatggctctgccccaatggcatgcctcctcagtcctgggaatgtcaaatgctgggtaaccaggttggactacaaatccaactacaagttgcaaacatggtcagacatgggtagttctgacctagggatcagcctggtggacacaggctgcctggcaggatggctggttaaagacaagcacttctgtgaggatagaggatttctagattcttgcaagctaagactaaaagaagctaaccaaccaaccaaccaaaaaaaaaaaaaaaaaaaaccctccagctgatacccagcacagagatgtgtatcaattgctaacaagaatttttctagaagctgcaccctccttcttttccctcctcctcctcctctcccttccctcctcctctccttcctcctcctcccttttttcctcctcccacgtccttcccttcccttttcctccccttccctcctcttcttccttcttccttctcctcttcccgtctcctccctttctctcttcctcatcttcctttttccctcctcccttttctcaatctctttccttccattctcctcatctctgtgtcctgtggacacagtatggtcaggcatctcagacccctgccttcttcaccatgatggactatagcttctaactgagccaaaataaactcttcctctccttctctgtctcctctctttcttctcctcttcctccttctttgtcctcacagcaattgtgctcacagcgatgaaaaaataagtaatacaatcccaagtataatggcattgcatactgatagaaccattggagatggagcctaagggcagtaactagctcatatatgcccatccatgcttgtgttagaatagtgggttagtgtttcaagaatggcttgcttatatgatagcggttatagctggagactatttctatgagtttggcaacttctatatgtacactgacagggaccctgtctaatgcaaagcacaggaagggaggcatactggggctttgctgtgccctggtactcttctgtgaattaaagagatcccaccacaagaaggaaggattgagatgaagaacagagtgctggcctgacagggagatagcgttggcaggagatatgggtgtcatgtttaaaggagttttccatcaagagtcttgcttgaacctgccttgtactggagggccctttagagggaagccacaagacaggcaaacatctctgaagagtatatcacagagccttcccatctgctgtgtagctcaaaacccactaaagaggctggacaaatggctcagcagtggagagaactagcttctagaggacacagattccattcctaagacctgcatgatggctcacaaccttcttgtagcttcagttccaaggcaaatgacaacctcttctggactcagcaggcacaaggcacacacatggtgcacaggaataccttcaggcaaaatacatctataatcccagcactcaggatgctgagacaagaggagttcaaggctggcctgagtcacatagcaagacacacacatacctatacacacgaagacaaaacaagaacaaaacaattagctcctagtagtttgtgtactagttttctagggctttggtgacaaaatacacaggcaagatggcatagacatcatacatttctcagagttctagaggccagaaatttcagacctaggaagtcagagttacttcctagcttccagtgtgtgggcaatctatgccaccccttggctcatgcagtctccacgtggttttcctgtctacctattccttcatcctacatacttttgtctatatcatggatgtacgagattagggcccatcccagtgacctcatttcaacctcattatctacaaagatcttgtttccaaataaagccacactctgaaacattgagggttaggacctcagcatatgagtttgataagtgggacacatttcaactcttaacaatataatcacgatgtgtgggcttgcttgctcagcaccccttctctaacctcagcttcacctgtagctaagtagagtccttgtgacaccaagcacaggaatccaggtttgagactgatggagtagggtaaattaatgcctgttgtctaaaatcttttctgttccactagagtggaagggatttcatccttgatgcccagcacagaacttcttatgagggtacagatttaaactaaaaaagatggaaatggcaatcaaacaagctgattagagaagatgcagtctttcagggcactccttggttctgagtacattctacccaaactctagtctctctctctcttctctattgaaacagcaccaatgatcccaaagggcttccagcaatagaaaatgaacaagtcagaaaacatcagttctgtcctggctctgcaagaaagagtgtggacatcaggtcatctcttctttgctgccagctacactctgagtgtcctgcacagacacatatccccttccacagagtgatggtcacagtagcctactccatcgccatggaagctacacaggagctcttgtagtcctcgatgtaccattttcatcttacagcaacctcagaatcactgtggtggtgtgctatggagggggttcaacctttttattcttctggggagccttctgccctcaggcctagagcctaaggatagccctggagtaccacacccataggatcatgtgctctgcagaaactgaggctcagatacgtgtgctcacgggtcctgcaggcaacttcatgcttcttcatttccagcactctgggtttcttcctctgaaaccccagcctggaggttgtttctgttcctctttgtttcctcccactttcttctgcagccttgagagtcaggccttagagcaaagaattcccttcagaatggtgccaggttgtggaaaccacagatgggaattttcgttgaagattttgctgggtgtgccatacttagaaagatggatcttcatgtgttcctccctgtgcagcacagagtgaccacacctcctatgtcctgccttgaggatccaattccaatcttcttttccctccctttccctctctccccctccccctctccctctctctcccacccccctccccctctccctttccttctctctctccctcttccccttctgccccccccacatatacatagtttctaattgtgtctctgattcttactctagccaaagcataccctctcctgctctctaagcttgtcaatcatatcttaccttagttaagatccaaacaacaaagaaacctagagctgcagagaaagagcggtggtttagttagggaagcgtatctttttcctactttgtgattgcattctattaaagactccactcacccggcctctgagtcactgaagttacaccaactacagttgtttgtccccccacctcctgctgtcctctccctctcctctcatgactttgtctgtctctactggaggttcttctagccacatctctatttcccttattacccatcttaaagtaatttttaaatgagtgttcattaaactcagatataaaaccttgtagcagagctacagaacctagtgctccagcaggacatggtgactgaacttggattgtttactatgcactagccccaaacagaggcacgcacacacacacacacacacacacacacacacacacacacacacacacacacacacggatatcctacagaacttcttggaggaagaaaggtgaatcataacccacagtgactggatcaaaaagccttaaggtttggtaacatagtaaaagttattaattgtgtgtgcttctcaaggcaaatcctagcatctcttcagaagccacctcgtcatgttacatgtctcccagaattgaatattgttttactatcaacccattttcttaaaaagcagcattaataacctctgatcctaggggaaatgtggggtgacttgggagggaactagaagtcaaaatgtatacttagcagatatattcacttgcaggaagacagagctctgactcctggtgtggatatttctactaccctcaggcagttttgtagcaggaatctgccggcctctggaagctcagggggaggagccagaagaaagacctctagcatactttccaggacctggggaggcttctctaacataccttccaggacccgggagtcgcaagtttatgtttaatcagctaattaatagtttgggttcatagttatttctattttacagagtggctataaagtctaagaaatcaccagaagatctttttaaggatccaggagcaggggcattatgctgaaatcttttctttaagctgtacaaagtgaaaagtgccaggcttctcaagggagtctagtgagcatttaggtaggaagtactctgctctccagaaaggagcttacacagtcagaagaagagttacagctgcctctgaggtctcggtatccaggaagaaatctacatcatgagagtcaggcagaggcctctggacaggcaaggctggcgagaaagagaaagtttctgaaccttgctcctggtaggcctctttccttaggtttatggaagccagggtgcagggtgtacaccagtcacactcagagcccagccacagagggcctttacatgggaaaaacgagggcatggtagctttcaggttcaacacagctcatgtgacccaggtgtttgcagcactctggtctctgtaggttttggaaacctactgactggctttaggaaataacccgatgttaagatcaccagtaccttcccccagacatttagaggcttattgacatttacagcagcttcatccttgaaaatacagacattggggtccctttttgggagggaggtgacagggttaatctaagggctgagggaggcagagagaaaaggccttgaaacaacagtgaagccaaccagattaatagaggaagagagaggggggtacaccattaggaagacaaagagaaaatcatgctggagcaatagaaagggaaatctaatatcaaccagggaaaaataaatggagattagggcaaacaaattagctttaatgggttcactgctaatacaaggataacagcagagctgtgaatgcctttgagggaagatgggatacagaacctgggcagtcatgcaggcagtagagattatgcagggggtggccaaaggggccaggggagggggagagaggggagacagagctgaggaagcacaagggaaagggggcctagaagggcctgctgtctttgataggaaggggctggggcactagtgacagtagggtcagaggaataattaacactgggtagaaataagggaaaacggctgaaggagacagaggacagggggacctacagctcgacaggcagaaggaaagaagtacaagcagacttaagaacggaggaaaacaaaccaatatggaagagtcggggacagaaaagaattgcattttttttctcactaaaaagaaaatcaaatagtgaagacatagatagacactgatctatgggaaacctggggataattttagattgggtttgggagccgcatacacttggtaggtggtgttgaaggcatggtcactcttagatagggtccgactaaatgtgggatgaccatcttactgccaggggtggcagaggtcacaaagtgcggagtatttgtgtaggtgttgcatgtagagactccagcttgagggtcagtttgagccctgctgtaatgtgcagccttgggcgaattccttacaatctctgctccccaccctgctgtatataaaatggaggtgctgtgctttctacctcaagggctgtgaagccaatttaatgaaaagatgcgcttctgcttggctcaggaagaagcatgtttcttgatgttgcttgcagccataattcctaagcagtaactaactcaggaaagggggtggatacagagcacaacccacctcccttcttccttctctttcccccttttaaaggccaatattggtaaaacacaggtcacctttgattcatgttcagttattacccttttatccaccattagtctcctgcatctgcatttatgtcaccccccctccataccagagatgaaatgatagtactaacccttctcagccacaccaccctctgggctaatctcagccagggcatcttcccctgcttctaggcgaagccttctactcctataaggagataatatttgatctggctgagtttcagaccatagaagatccagaattgctgttggttctcccaactgccttaacgtttatggagaagcagagcaggccagatcagaggaaggcatccaaaagaattcccaggagtcaatgagtaaccacccagtcatgcaattcaggaggaaaaggagcactgtggttattcttgacccccacggcatccagaaccaagcttctctcatcacgaaggattgtaaaatactaacatcagaaaacagcccgggcaggaggcccagagttgtagagggatttgctacttgctgagatgtgaaaaatgaaattggaaccatttcaggaagaaccatccatgaatccataaccccaaaaggatggatatcaagatggatacagaaatggtaaacctcagcagagggcctacggagcccaggttccatgctaagttcataggtgtctcatatcaaaacaacatacctacacagagggaagtgaaggtcataacttagaggtcaagtacaagttttctggcctccaccctatacagcttcagagaatgaggttcatatattcattaatatatgaatcactgccaaaacacatgagatgaagctgcttctacagtggagtgtctatggtgaactactaaatggagaagtcaggtcaggaacatttttacttgttggtactaaagaagttttggtttttgaaaaatcttcatattttggaaatttgggttagcgatgaccaacccagatctcagtgactctcaaattcttcctttgtgcttttatattctttgacacccaggaaattttgtttaaatccagctgctgaaattcctaggaacaggtttacatcttttgaccacactccaagtgatgctaccggaagaactccaaggaaacaaggttctaagattcggatcgatttagtcatggtacttgaaggtagtattgcgcttctaggcagtgagttgcaggaagcagtctcatttctttttactgaatgaactatgaaagacacaatgtggcactgcccacatagtcatgggtcaaaaacttcttctcaagctggtgtctgagctctcaggaaaggcaacttctactactaatcctatctccctagcttgagctgggactcacaggtcttctccccaatagaactgcaagcttcccaaggccagagctgtgtagtcactccaacattcttcatgaaaactttgtgaccagagttagcagtaaaaggtttcatagctaggaattttaacacccacactgatgacaatttcctcattggtggaaaactgtaacaataaaacagcacttctttctccataagttcctcaaaacatgtagccacattcatgcataaagctggctcctcacagaggtatgaagcccaggagggctcatccacttaatgtgaccatctgaggcttgggtacgcaccagcagaaaggccactgcatccattctgtgtgtccttcagaagcaatgcaaacctcttttttcctgggctgttatatgtggacctccttctttaaatacttacatctaagaatgggggaaatagaattctcttgaaggcaaaatatatgtagcttcctctcaacttcctcgggccttctttcctccatatttgtctttgaacttcctgccttccctcactttttcttttccctccttccatttacattccttctttccttccaatttagtgtcacagtgttccaagcactactttggatgctagggtttcagtaaatcacaacaacaacaacaacaacaacaacaacaacagcagcagcaacaaacaaacaaacaacaacaacaacaacaacaactgttaaacccagtttcttgaggggttcctcaagaaacagtttatccatctcaatagttggacacttatagtctgataaatgtggtagtagagcctgggcattgacttctttaggtgaaagaaccagagggagcaggcaagaaaaaaaaaattggaggacttcctgtaagaggctaactcttaagatataaatgaaatgaaaataaagtaatggtactccaagcataggtgaggacccacctatgcctggagtacttaggcactttgacaaaaatggtactaaagtagtgattttaagacacagatggtagaaatgagtcaagagagaaaggtcatggtgggtcttgtctgctaaatttagatgcttggacttaccatgaatgaaaggatgccatgtctttctttaaacgttatttaccatgggagcgttacatccagacaggtttggatgcacttatttccagctgcaaaacaaagagttacatgggggaaggttacatggggcaggggtgaggcgctcagtgagttcagggaaccactcctacctgtctagattctgttacctctgggggtttcctcttgtccttctttaaatgattctacttctcttgtcccccatcagtactctaattccacatccattgtctccttgtagagatgttaactattaggcgttcatttgagtgttgatttgccgaatgtgtaactcctcctagactgtcactggaataaaagctccagggaggtaaagatcagatttgtgtactcacttctgctaaagtatttggtatgtcatagtgcatcagaaaatgttgagtgcatgggttttttaaatgctgaagacagttagaagatattggtatgaacatttagagatagaaatgatgtatggtctgctgaatataggagaatggaagatgctagaaatggttggctaattcatatgggatatatttatttaacgtgttacataatttaaccgaaagtgaacaaatatttttgacctcacatggcttcaatctgataacagacaaaaccccagacacccttctccgcattcatattttttcctgactatgaaaatttcccttcttattttcaaacaagtttctcaaaaacagccatacttgttgctagggagagcatagatgaattttatttctttttataccccgagtgtgggcctagtagaaagtgagtggtaaaaattgatttttgaaataggacaacaagttatatagtgagtttcaagaacattctaaacatgagcagtatacaagaagtgaatgagaaaggtaaacagtcgctttcaaaggtaaagatagaccctgtctcttctggagcttcccttagtaggacaagtggtccgcacaagacaccaaagatcatgcagagaggttgggggcggtggcgggagggggaggcagagtggatccatgatgcagctctccagagggacatctcaggatgtgatgagctcacagattgaagtgactgctctactgacatgagacagtggtagtccatggtcccagcacactttctttaggcacagtttgagacaagcttggatttttattttataaaggtataaagtcaagatggagatgttgcaaggttgtgggtattgcagacgtgaaagccagtgtcctagggaagggcaacactagagtgagagccccaagacattagcattagcaagacttactctttacagaagaggggagttagcatgatttgaagggtacctcaaggcagtcactgcacatctaactataccttgccaagggttgcccactcttggagcaaaaacaaaaaacaaaaatccacagatagtaaaatttagttttgttttgtttttacagcacagcatggcacactgagcaattgttatttggggctgagctttaggaatcaagaagatgagaaaagaaaaagaagtactgtggaatgggatgtgagggtcccacagtagggactctgagttgggtgctaagacttgacctcttccctcgaggaatccataaaggggaccaaatagataatgttgttggttaaagtcattgacatgatagtgctacagaagatcgtggggtagcaggaaaggtgtgcttctgtcttaagtgtttgtgtgatgagagttttaagtgatgtctctgtctcattctttcatccttacttctcagaaagttctgagtggagaagaaattaccaaacaatatctttgggtctcccacagtggtcattttccccaaaggatgcttctagacagcaaacatcacctaaagctttacagacctgcaaattcatttaacttaccctaagtcctccctgccctgtaaaacttgtgtttccccatctgaagagtcatactcaagaacttccttttatccggccaggattcctcttacatcaccacctgtctccacccacagctctctagacaaggtcttttgagacctttgcttatgaagcttcaaacgtcttcctgatttacattttccccaaccctacctctggaccaagtatagagctcctactgatcactggcttccggccttaaggcccacctgcccataaagtacaaagcagcacggagacagtgggcatcagtcccttgcagagggcaggaaggaagcctgcacccacctctgggcatttggtggtgaatcacctagagaagtccactcccccacaccggacacagaaactcaaaagcccttccatcacagaactcagttcagcccatagaggccattctcataagcagccatttggcctttcccaacctttcatacataatctatagaggcagtaaataacattcaacttggtcaagactttatgcaaggaattttttacttcctacagctatttactttctttctttctttctttctttctttctttctttctttctttctttctttcttttttgtatgactttctttctttctctctctctctctctttctttctttctctctctctctctctctctctctctctctctctctctctctctctctctctctctctccctccctccctccctccctccctccctctctctccctctctccctccattccagtcattcctttgatttctctttgactgtctgtatgcttctccaagcgacttctaccttgacatgaagattttcaattaatctggctgtgtctcccgaaaaggatttaaacatttatttcttgttccaggttacgtacccaatgctttgtgcttgagtcactattagcgttttgttcatatgtgtggaatcgaaatgaaagtcattaaatgcacatgataattataactcttgaaaaatgattggagaaagaaagaatatcatcttgtgtgtttgttttggcaaccattgctcaacacccagcctaaaccagtggttccaaagtcatacaatctagaagcttctccaaaacaaacttttaaaaaagcttttgttaattctttgagaatttcctacaatgtattttgatcatattcatccatcccccaactcttcagagaccatcctccacttcctatccaccgaatcaccccaccgtgtgtgtgtgtgtgtgtgtgtgtgtgtgtgtgtgtgtgtggcggggtgtatacacacacacacacacacacacacacacacacacacacacacacacacacgttaatccatggagtcaagtttttgttggcccactacttctgagaatagaaccagatgttgccccattaaagaactaacatttcctttcttatcagcaatcaaataccaatagatcctcagcttcaagtgctctttctgtcttccacgatgggctcttgccggcgtgagcttgtgcaggtcttgtgcacactgtcacatcacagtccttgtgaggttgcatgtgcacctgctttgttgtgccccacaaacaccgtgtccttgaattcacccaacacctctggctcttataatcttcttacccccttttctgcgtagtcctctgaccttgaggggaggatgtaatatttatgttccatttagggctaagcattccaaagtcacttcctctcttcacagtgaacggctatgggtctctgacaaacaaaaatgcttggttccaccctagattaactgatttaaaaacttaaggtattgtactcaataggtctttattcaataaaccctacaattgaccctggtgtgtatttcaatttgagaactccttggtcttagggtcaaatcagagttaccaccatgttatatcaaccacattattgctacaatgaaaacctttacatttatatcaagacttttagctaatgagatgattctttatcttcatcccaacattgctgttgctattgtcagtagcaggtacaatgaaaaatgctgtcaaactctatgtcatgcctacagctagaaacaaacaaatctactcaaatgatatgactaaaacacatagaatcaaggcagaaatatgacccaagctcttccccaataaaataataccttagagaactcagagttcagggtccagtgttgtgattgtctgctgtgtatgtagtgagcttcagtagggttctgagcatgtggatatccaaggatgctgagtcagcccttaggataatttaggactctagtttgtaccatctctattggagaaccacatgagtaaattgtgcttttttgttttgttttgttttcaggcaaaatgttcaatttgtgccacctctataacacacacacacacacacatacacacacacacacacatacacaatctgacttctagatagactctagcacaaagatctatactccatgcagcaaaggttctggaaaatagtgacaaagtagagctgcctaatgtcttgtacatttggatagccatctcatgtgccttggtgttcagagtgtagatcccaaagaatcaaaaggcaaccatgagaaagtgggaggtaatttttccacaaagggtagcgtggccagtgaggggtcagaggaaatgagtttaaagagccacactggttattgcctgtgctggactgaaagtccctgagacatcatctaactcatggaaaaggattcatcaggacaggtgatgtagaacaggacagcagaagctgtcctggaagatggaccatcctgtccctcatacttggtgcatagccagtgggtttttcctcctaacttattgctcaggagagaggcttatgaccttgttcgttcattttaagggaaattatctgttctgttgaagacatcttgggccccaaggagaattgggaggtggttctgaatgtgctaagtcagtggggataatgggtacagtgtgtcctgcaaaggcgcttcccacccttgcccattaatattgttaattggtcacaatggcctggtattaactttcccttcttactggctgattctctacgactcccaccccatgtacactactggctgctatgcagtaaatttcaggatggtcctaagtgcttgagatcagaccattctgttccccaccctaagctagatcaccagattcagttcttggtgtgaaaagatgctagtcatgcctaggcaatgacactgtcatcacaagttcgaattgacgggatcctctccagccatcaatcaagggcccacaaagaagcagcaatcattggatccctaaccattgtttggatcctggctactcttcacaagagctgagtcatttgagtgaagccacagaaatgctctttatggacttctctttggaaattgtatatctcagacctgaaattaacacaccattagttgaaaagcagttgcaagtagtgcaaatctaagagacacctaccctcttaacccccaaacctttgcatgtactattcccatggctcacacaggatcccctttctctcatctagcacttctttgctttgagtctcagcttgcactttaaaaaggactcttctgtgcttctctgaccaggggcaggtctactgattcaataattacctgtctaagtctgagattccagaaaagatcatgagggatgctaattagctggcttaggctcctactgcgataagccctgtgaggtgggtgcaagaatgcaggtggctttattcaccttggggcttcagaacctgggaaagcacctgacatgtactaggcactcagcaggtatgggtctgactagatatgtatggtcagaatgaagtacagaatcagtccagagggtcgagtcagggaagcagctaaggcttggcttgtcatgcactgtactgtactgtaccactctgtccccagtctgaaacagtgctacaaaactcatgggatgtctcctagttaattctcaacctggtattttagttctctaatctgtcaaaaagagacacgaatttgggattgcttaggcaagtcagccgcagacagggctcagtccattctgacctacctcaaccagagactctccttcccttctttggtgtttgtgttataaaatatggttctgtggtttaagcggagcaagacaaatggaaagaccatccatctcatcttgtaccttcatgtcaatgagaagaaaagaaagttcgagggaagggagatcttttcttctgtgtcactcagctcagtgtcagcttaagaaaaccctgacttctccactccaacatgtctgcatatggaaggaaatagggaaagggaggcattgatgttatgtggcataaagggctgggctcccgaatgtgatggagcagatctaaagggctctcagatagccatgtacttcttttgaatgctcacatggacagatgggctgagcagtttatgttacttgtgccaagctcctagaggattgtttctgagtaagacagggtgcaagtggagggaccactgaaagaactgaccatggagtacctagccatgccctcacacctattcatactcaagactaattctcatctgacatttatctcctggttctgacacttgtccctgacaatttggtctgtttttaggccatggagggctgaatcaactaggaggggcctttgtgaatggcaggcctctgccagaagttgtacgtcaacgcattgtggacttggcccaccagggcgtgaggccctgtgatatttctcgccagctccgtgtcagccatggctgtgtaagcaagatccttggcaggtaagcacgaaattcaccacataccacttttccctgcaaggtttgtcttctgtagtcaacctcatagctgctggcccatgtaccatcggattttgtgtttttcaaggcaaaactttcagaatatcatttacaagaagtaatttaagtgtttgatgaaatccatagccccacggaacaaacctctcaggtagacctgtggctcttgtaggatgaccaggaagcatgaaactcagacacacggaggactgagaaccatccatctgtaagactcaacgtggtggttcactgccctggctgtgccagggaactctaaacaatcaatcagaaggtcaggatctaggctccagcacaagccaataaaagggagtggactcaaatttatgtacatcattggcctccacctcactgaagtgattttgattatctcagtcggttggggctgagaactgcagggcacaggttcagaaggacaaggaacacaaagcctctgacatgtccatcagaaatattatttaagtagagagtttggaaatcccagagttccatgtcctgtccaccttactctccaacccaccacacagacccacatgtaggttcaaggtttcccttgaaggggctgctctaaacagaaccatagagagccctggctctgcctgaaatcgctagagggaaagtggccttttcttagggaagaattttgaatggcaaggacaatggccttttaaaagactcatgctttgttttattcattggtagaagagaccagaggagacaaggaagaccagagtcttaattaagccactcatctctcagctagttgtgggttagatgggctctgaaggagggagctcatgtttaggggttgactcaggtcagggattctaagtgaggctggacttcagaagcagctttaacttgaaccctggaacttggcagaaaaccagagagcaaagggtgaaggagatggctcagatttgggcaaggcaaaggtgacccagcaagacagcagctggctttcctgagttaggccgggagaacaaagcaggggagtcagggagtcagtcatgctaagagaaggtggatgagagaaacagtcactgcaagcctgagattccccagcgtcaacactgaaacatcctttctcacaaaggtgatctttgtgggctttctgatgcaaatacagcgagctggtctggggagaagcctttgcagaggggtcttgctttggcagtagcatacatctacccaaatacatgaattcttggagagaaatccagtgttaagatgagcaggagtcaggggagggccatgtctcagttccacacctctcctcaggagactcaggggggacagaggctctggccaggtccatgttcaaaggccccacctgcttattgggtaattttggggggttctctattggagtaggtactacgagactggcagcatccggcctggagtgatagggggctccaagcccaaggtggccacccccaaggtggtggagaagataggagactacaagcggcagaaccctaccatgtttgcttgggagatccgggaccggctcctggcagaaggcgtttgtgacaatgacactgtccccagtgtcagctccatcaacaggtgagagacagcagtttatggcaccctcctgggccctagggttctggaagagtcctgtaagaaacacgaagggcctggcctgggtggagtattgttatttggatgactctttaatttgaagaatcaggcaggagttcctcggcctggcacaggccaccccttccagccttctcttgttcctgctgtggcacctccctctctccccacactatgttgtgcttcctcaaacaccacatgctctttcattctgtgaaagaagttcctggcccccattgactacttggtcacatgtgcacttttgctcactaccttttcatcacagttgctcactcattcattcacacaccattcattcgcttattttgtattagttcccagaacacagaatccctgtccttgtagaattcacagtctaatggtaacacagacacagagtacccacaaagacaggggaaaaatgcagctactggtcctgctgaggctaggagtctgaaaacagcaggggtagcctatggtaacttgtcttagggaagtcatgaaagcttttccttaagtaagaagcagtgagtgggaattaactgaattagcagtgaatgggaattagaagaagagggataccacggaattttgacatagcatataaagggcctgtggttaatgagagcttgcacaaggagatgaaagagagtcatttgagatacaagaaaggcctgagtacactgactataagatgccagaagaaactgcccccaagaagcctgtgggcactggaatatattcctgcctttgatgactgtgcagcaggcagccattagagccattagagtattttaggcaggaagctgatttgtatttgaaaacacttagtctggctgaaaagggcagaatcaattagagtaagtggggttcaggaagggccacttgaggagcagagcagctggtgggtggcactcattcagatgttaacagtgagatacaaagcaggaccaatcctggggtctagcaaagttaaatctacagctccctgttaatctgcagctagctatatgtgtgccttgaggcagccatgtttctagtcttgacatgggacttgagcagtcaggtatgagaacgaggtaaggccagtttgacagtaaactcagcgagttgaagacacatttaagatctccaagtgggttgtcatgaaggtgagtggactcagggcaaccacagctcctgtttcatcctctgtctctaacagtccttctgcttccccacagaatcatccggaccaaagtgcagcagccattcaacctccccatggatagctgtgtggccaccaagtctctgagcccaggacacacactgagtgagtgtttagggatttggctgtctccatacctttgaatgtaaacccgatctacacagccatacagacatagacatcgccacatacagccacagccacagccacacaagagcatatgactgctcatatgcctgtacatggactgagcttttaccctgaggcacagtctatttcaatgctcatgggatactcatgggaacatggtgaaatggatacacgtcagacaaatgccattcgaggaagccttcctaccagcaggtccttgaagggctgtagctctccagggcctctgtccacagcatagcctgctgctctgcatccatggtggtgatagtggctatgtagagtattaaaacctatttctgatcctctccttattcctttgcagtccccagctcagctgtaacacccccagagtcaccccagtcggattccttgggctctacctactctatcaacgggctcctaggaattgctcagcctggcaatgacaacaagagaaagatggatgatagtgagtgctcaggggacctgtgggtggcatgagacacaggagagcacttggctcaagctttgataggaagacaaacctttccttccatggccctggcttagtagggctctgaggctccctttcacaggagcattggccctttcccttagcttgttctgccccaacctcttcaccccatctgctcctctgctttggagcactttgacctggtggcttggttgaggagtctcctgaaagctttcttcctgcctgggggcactaggtgaccaggacagctgtcggctaagcatcgactcacagagcagcagcagtggtcctcgaaagcaccttcgtacggacaccttcagccagcaccatctcgaggcccttgagtgcccgtttgagcggcagcattacccggaggcctatgcctcccccagccacaccaaaggggagcaggtaagaagctgggatgcaagagatagacagggtaggcaagcgccaaagcaaagcatgtcctctagccatcaaaacaacttcaaattgctcccacgggcttcacgcacacactttccagcttcacgcatgcgtgccttactcaccatatgcctccatacctctctcttctcacaacccacatctgaactttgaacctagttttgctttcagggccatcctttttccttcagtggctttctccaacaatagaatcgggctcacaattgtagttaaagctcacacccttcttatgatgacctcaacaccattcctagccctttgcataatctaggattctgtgtgactcatgtgctcaagctcaccagcctcattcacacctctctgtccttgtacatcatgtgccctccttgtagaatgcctttcttctcactactctgcctggaaaaataccagctggctgtgactcaggtcagtcacacactctatgaatttgtccctgcccctcacctacgattcacaccttgggaccctgtcatccttcctgtctcacacatgatttctattgacttctcacagtatttcctaataatctaatgggggtgggggaggtaaaggcaacagacttaggggcagggtggcctcttgagacacctcccccatctctagactcattactattattacctacattattattattattattattattatttatttattattactttttgtggtgatggagatcaaacctagggtttcacacacacacactagacaagccctctccctttgaagaatatcccaagctcagtattttaatagcttttcaatgaaggtatattgaatgaatgaaccaatgagtcagttgagaaatcaagaatgataagatacaacctacaggaagatttcctctccagaccttaggaaaggagaaagaaatagattataatggaatggcttctgtaaaaagcaggcaatgaacattcccctaccgaggttgacaaatattccaaaatgcaaacaactactaagagacattttctatgatctgtcaatggtcccagtgtctgcctcttttattccatctagtcaaacactccaggaaactctttgggctatggctagcctatcactgctcttggcttgaggcaagcctataggtacaccttgaagccctgagggagacaatgatgatgatgatgctaacaagcagctgaaacattgccagcaaatggctgggctcctggccttgtgccaacccccacaactgggcaggcaatatgcgtcagtgatttttatcagctttggctatgatagctgtaaatgttgtagacaaagttggctattagcagacccagggagaggcctgggtatacttctgatagtcagagcatggttccagaaggcaagtgttgagtctgcagaaagcttattctatggtagcatgcaaaatgcaatacgcatatactagctatccttagagaataatgaatcccttctgaggagaccctgggcatctgctgggtcccagagccatttactgacttcatcggtaagtcctccaacagaccttgtttggttagagagaacccctgtgctatgctggagaatatgcaaggaggatgttaggatgggagactttagaactataggagacttggtggccacacagcttaccttttcaatttgtataagggtgactcagtgcctggagcatgggaggacttggaaatagatgttgcagagtttatggctgccagctctagttttattcacaaggatcattccacccttgcatatttttgacattgtgatcccatggattttttgggggggggcagggggagtccagacatggtttctgtgtgtagccttagctgtcctaaaagtcactttgtagacctggttggcctagaaatcacagagatccatctgcctctgcctcccagtgctgggattaaaggagtagcccaggacattcttacataaaagcgaaatgaaaccagaatacttgaaaatcattaagcttctctaagcctcaacctagaggagtaacctgtccctcagctactccttccttcccccattcagtcatcaggatgggttgtgagcagcagatcatcctaccttgaaccttgctcttctgcctactatgtctgattgtgccacccaaaaggaacatgtcctcctgtccaggcacagaggcttggcatctttgggaggcaagataaaacagatatttatatatgatcttagcatggaaaaacaacaagggtaagagtgacctcatttcttattgcagactcacccctaggtaatattagaaatatgtgtatccttcctctatattttaaactcaccaccatgtggatcaacagaatgagagagaaggctatgaagacagaccaggaatgtagcagttactaactcttccgtagtaacaatacacctattattacttctagctgaaaatctgtgcttgctgagtattctgtgccacgcaaaaatttatttaaaatcacagttaatatttaatcagtcctgtgcggtagattctaggactcctattcttaaaggtaggaaaaaaaatcaaggctcagagagctcaaataaattacagcttcctgttgtagaatcaaaaccgtgatttcatttctgaatcattatgctctcctgtccccaactcatgtttaagctcagaaaaaaaaatccattcatcattggcatgtttaagacattgaacataacatcatctggttctctaactttttctttgggctgagtttggaccagaaacttgatttttagtatgtattttgttgtcaagtcaacacattcacaaggcatttcaaacttttcttacagtctctagaaattaggtattttgttcagtttcactagagcaacttcgccttgcctctaagtaggcccctcagaagaatggaaccagagtgccacttagtcagtaattgctgctacgtgctgatggtgccctggtggcctccagaattgactgcagcttccaaaagtgccctgcatgcaaccagaaagcattgtgactccttggagaactgagctcagtggaaattactgaaaacaattgtcttcagctgagctgttatataagcatggactgaccagtcctgcaatccagtcttgtacaacagttcacataatactttgtgaaatatacggcctgtatgtggggagtggatgtgtgctgtctttccttgggaaggacagcagagagccaatcgtggcctgtagcctaacaaattatcttctcaaggagtagccttaggccataagcatgctcatatcacggagtaccagtaggagatggaacgactactggtgctgaacataaaccccaagtgcttgatagaatttttaaaacaaaatgaatcctatatatctttcaaggtgaaactaaatgtttctatttgcatgggtcatgcaaatctgacatagtcttacaggttgtaccagtgggttattcaataagaatggtagcagcacaggcagaccgtgagctctctgcaagtttaagaagcgatcactgtactcagagtaggtgtacctgagcctacatccttgcatcaccttacaggagaggggttgtacttccttcagctctgcacttgcatttcctaagtggggggatcaagtattagtagagtaaaagactgagcagcctctcctgcaaccaatttcagctctaggcaatgttctgtgtttggggtctaagccatgtgaaaaactaggaaggagatcagcaccctgtcagggcatggtcctctgatggccagtctatcacatgcctggacttctatggcaacagtgggccttgaattctggaacttggaacggggagccataagccaagtcctgggagagttctggggctctgagtgggagagcatgctatgtggagctaagagaaaacaagaggaccgagtcagggtgcttttcttaggaagactagcatctcccactgcagagacagacaggagggtcagtaggaagccaggcttgctctacccctgctgacttccctttgttctccaggggctgtacccactgcccttactcaacagtgccctggatgatgggaaggccaccctgacatcttccaatacacctctgggacgcaacctctcgactcaccagacctaccctgtggtggcaggtaggatgcctagaggctccatctggactctactgtgagggtcagcatgggtttgggggcaggaggaggccgatgcgtctggctggcaggaggaagaaggtgtttggggtactggcctggaaaggagaaataggctctgctgactgggcctcaaagtggagcaaggggtggtgccttcagtctttggaccccctggatctccccaatccttctaacaaggagaggccgagcacacacagacttcagtctctcatccatctacactggcagaaggcacatcagagaggtagagcctgcagctcctccatctcattccatccaaggaactctagccatggctctccatcctagactcctcctacagcagccaggcctgcctctccccatacccttgccccatctcatggcttggtttgtgcatgttcccaccccatcatctcacacccctctctccttgttgtttccctccctccggcagatcctcattcacccttcgccataaagcaggaaaccccagagctctccagttctagctccaccccttcctctttatctagctccgcctttttggatctgcagcaagtcggctctgggggcccagcaggtgcctcggtcccacccttcaatgcctttccccatgctgcctccgtgtatgggcagttcacgggccaggccctcctctcaggtacgacagggacgtccccgggctctgtaggtgtcgtggggtgggagggaggtcaagtcctcttgtctgaggctaatcttatctttaggctaaacatcatcaccttgttctccaatttatcaagcacatggttctctccctatgggagaagtcaggagttagaattagccactttgagggtaccagcaagtggaatataccactgcatcttccaagcagaacattatcccaactagtcaggacccgagctatgtctgaaggagtcaaggtttggtttgggcacaggcagagacacttcaaagtcttcagatagttgactgattattaatacagggatcctgggatgggggtaggggtgtcccagaaccaagaagggaagtaattagtttccagttgatcattggaagtctcctgtgtgagagagctgtctccattgattatgaacagtaagtgacagagagcatgcctccctgtctcctgctccctgggccctgtcaccttgagaggttaaagcagacactgggagacttggcagggacaacccaggttggatagtctaagccatcggaaccagctgtattccaatattctaggcctgtcttgaaacttaaaatgaaagccttcagcatgccatgtgtcccagccagagcagcagagtagttctgaccgaagctggagcactggcttgagaaactcagaagtgtgactttgcctcccactggatcagaggtctaaaggccctgggacataaacccaggcatgctttcttataaatgacagcgttttctgcttgtctgacaactggtatttccccttttctgcacatccatgcaaccttgccatggagatgggcagtgtgagggcagaggcggtggccaaggatctgatgaaagaatggttcacttgtagtttgaaatttcaagagggtgaagtcagcagagatgggtcatttgttttgagcaaagtgattaaaatgcacaaacctgtgagcagagtgatgtcagccagagactatggaatggggagtggagagggagagagatggcttgtgtctgctgtgggagcactcagggcacacttgtctgccttgtgagaatgagaggctgagaagcagctaagggacctaagaggaacacagggtgaccagacttgtgggtccatgtattcaagaacaagaagcaagttaagactacagtttggagagccaagcccagatctgcagcttaaggacaaggcagacatatgccagtgcttaagtcggtttaaggatcagtgcgctgtcctcagagacttcccacctaaggcctggacaagcttggacctaaatgctcatctcttggctgagccctcatggggttgagagagcatagtaggacagagggattttagagatggaatgagcttaaggaagcagagagcaaatcatttctgtgatatgctgcagaaagagagggtggaggggaaggtcaggaaatctcctgaaattagcccagctcaatcctccatggatcatcctagccccctcctctgttcgactttgcctaagaaccctctgtcacctgctgaaacgtatccctgctccacagactttctctctgagattctgtgagtatcatctccagaagaccgcttctgagcatcagctttttttttttttcgtcatccaagaaagggacaacattaggacttgggaaataatgagacttacctacaattcagctagtcccctttagaacacccctacacacacacacacacacacacacacacacacacacacacacacacaccctatggattccagcccactggccatgacagtgacatcaaggacacccttgtccttgctattgcaaggctgactacagctcagatgatgggaaggctgccattagcctttcatcatcaaggagcccagtatcctcctccattcttctgtacaagatatatttagtcttgccaaagagatttctgggttgccataaattctccttgctatcagaacaagataaggcattgaaaaggggttacacagagggcggacatcaaagaggtgaaaagaaatagtctcaaatcacctccaccctctggattccttcctctagctaatggctttctattccttctcgctgcctctaattagaatatttaccaagagttctggaaccctaggattttcctagggaatcacactttgtagccagccaacctatgttgatgcttctgtcgacaattttaaaagaggctcttgttggaagtctacagagagaccgaattagacagtagggaaacgttgaagagcctttaaaatagagtaggctcgagggtgtctgaccagaggggaacatctcaatctcagggtggcagcatccgtccttgtttcctagattgtttaagattctttgttgttgttgtttgtttgtttgtttttggttttgagacctcattatgtagctcaggctgccctggaatttactatagaccaggctggcctggaactgatagaaatttacttgcctctgtttcctgagtgctaggattaaagatgtgcaccatcacacctgtcatagtttaaggttcttgactctgaaagactttttttcccccaatgctgtcattaagtccaaaccacacaagtgctctgctactgagctacagccccaccttacaaaactatgttcctcaagaaattctggaaggacggctcagcaattaaaagcttttttagaggttctaagctcaattcctagtgcccacatagtgagtggctcaccaccctctgtaactactcccatgggatttgattccttctcatggtgtgagggtgcacatacagataaatctcccaaatacataagatacataagtaaattcatattttttaaataaatgaaatgagagttttgtggagctgttgagacaatatatgaaggtacagtttagatagggtggtgtcctggaaatttttttttgtctttccagaagggccaggttttattaggagaagtctttggggctctgtttaggccattgattcagaaatctttcttgctgagagaaaactaggtagctgaagagaaatgaagattaacattcctgcatggaggggcagagaccaatgatttttttttcaagagctattgttcatgggttgaggccccaccgagagagatcatgagttaaactgtgacctgaggtatgtgctcaggaactctgcgcattagacagcctatataaagaagctacaggttcaggggacaggaagtgacttaggagggcaggggaccacaggctgccagtggcaggagggcgcccagaacaactgacattagcaaatagatggccagagagcaaaagtaattgtgatccatggaagaagtgggccctgcctcaaaatcgtccacactctgtgcaaagaaaccccaccagccaggaagtaagatgaacctaagttctaggcctcctgtgaagactataatttggagaagttaggcaatttgttcatagtcttgcatggatgtaatattcagtctcagttttaaactctctctctccccttctccctttccatcccccttttcctctccccctctccctcttcctttctcccttgctcctccctccctctagctcttctttctctctctcccttctttctttctttctttctttctttctttctttctttctttctttctttctttctttctctctctctctctctctctctctctctctctctccctccctccctctaataaataagaaagaagaaaggcaaaatcatgaagcctgggtcagccaccctctcccatctctttctactgtgttagccactgcccggcaccctgcttctcttcctttacagacccacatcctcacactcactgtctgcatcttggccaggtacttcacacagggagggccaaggggacagcagtgattacattgttggctcctttacatgaaactcaaggctattttgggtaaatcttctgtttattcctcattctaaatatgtctaatcctcgccacaacttttttttaagcagcatctccctcccttcctttgttctcttgatgcccttatgtcagagaccacttgtgtagtccaggaccaaccagatctaggtactcaataaagacggatcaatttgagacagatgttcaggtgtctaaaaaatcctaaagctattttaaataacgaatactaacagcttatttctgacaggatgattttctgtaagaacttcactgatacatttctagaatgtgtccattgcactaatccgtgtccacctggaccatgaggcaacaggttgaattatgttgataacctcagagttgtaggactagtgtatctaaggtcacacctcccctgcccctttgcatgcaaagtaacaggtttaggagcagagtggctggtctaagggcagacaaagagccatgaaagtagggtgactgttgtagctctctgattcctagcctgttctcttagggaaaagggacactcttgaatgtgcaggtattgtttgttgggttggccctaaagcctgtcttagtataagatccattaaacgccttccgacctctttctctctcttcctctctcccctaagtccccaagtgcctagtccttagaaccatctcaaaagtacttcttgaatgaaaaaaatgttctcatgggtaaagaagaattagtcactgtggggctggcaatctatagggtttcatgatccttcaggaggtttaggtataaaggatctaggagggcatggggaaggaagaagggacaatctgtgacacagagaagatatgtctggcgagttgtttgacagagattcacaggcagcctcagaaaggtgacagaaagcatttgacccaaatgcctatcatctaacatagtggtttctctaccaggagtgatttttatcccctgcttccttcacactgggacatacagcaatgtctggagacactttgggttgtcacactgggtgggaacttgtactagaatctgtggggtagtggccagggatcctgcccaataccctgcaatgcacaggacagcgacacaacacatactttaccagtcaataatgtcaatggaattctataaatatcactaagaactagtttgtccaaattattcattattcacattggagcattttaagagttgaacgggcattgttaataaatattctgagtcagtggacatcacatggacagacctcggaaaactaggatatgtagattctggtctgaacctagagagcagggtagcgaggaggcaagcagtgcttctggttattaggtaggggtggatggggagagcatcggcaggtcaggtggggtcctgcaaaaggagagctttactccttgatgtgaaggaagtacacatccaatgagatggggttccacaggaatgccttggtgtcactaggatgtaggcatgacacaaatcacagataagtagagattgatcagggatgaaacatactgaaatgggaatttaaagaagtataatatgaccatgtgtaaatgttagcagtctctcagtgatgttttcttttacgtcaggaacagtcctgtttcatgtttcatgtccctttctattctgattaattatatccacctggaagtccaggccaaccagtgggagctttctctgtggttgattatcaatgtctaccacatgtctccaaaagacagtgatggatcgtccatctgcctttatttcacaagacctggtttctccatccttttgaaagtggggaggaagtggtgtgtggcttcttgtgtatttatttagtccattggtgccaaacattatgttggagggagataaagaccaagaagacgccacccctggtacccagcaccttgatattttggtggagcaataaagcaatatttgtgaaaataaagctactagggaacggggaacagagaaggactgcagttgcctgggcccccgcttggtgagcctctgccctccagagaaaacaagagagaagagtctggagaatgactgtggctgaggagagacgtgccgagcctcaggaggttggggtggtaagaatgggagccacccgtacaccaaccaatgactctttggtgtcttttaccagggcgagagatggtggggcccacgctgcctggatacccaccccacatccccaccagtggacagggcagctatgcctcttctgctatcgcaggcatggtggcaggtaagggtcgaggggctgggcataagcattgcaaaagggaaggaagcactggagaagttgagagaccataggtgatgaaagacaggctatgtctcactcataggcatcccagaggacactggctcaatgggctcccttcatagaagcacctagagagaacctccactaccgtcttggctccttgactcctcttagcttagccttctgcttcccagaccttccacacagacagacctatgcttacattcaagcacccctgcctcctcttcagtgcattaaagcggaagagtaagcagccaacactgagataagcatgggcctaagccctggactcttggagtttaaatcaaataagatgaatgtcagtttacctctgcattaaaatatgaatttgaatgatgatgatggtgaggataattatggtgacggtgataatgaacatgatgatgatgacgacgagatacatcttcctttgcattccacactcaacaatgagtggggctcaggttctaactaccctgtggatgccacagagtatgaacagtccttcttcacactcttttggaatgtcctttacagcccgtttgatgtctgtctgccaatcatgagctattgatgtcccaggatgccagggtctggacaaacgggtagagtaatgacagttttttttggggggaaagtgccagtctttagaagccatgtcagaaagctccaggatgggtgggtagttatagtagaaccatttccaccgcccagagaggttaaagggcctgaagcttttggggagggctttgaactcaggccacgtgtggcctcctaatacaaaccctctaccaaccttcctggctctgaccctaaagaccaggccccattccaccaagcatgcttccccctggcaggggttaatctttgccagccacccacccactctgggcaccctgagcgcaggcaggtgggctgtgttctcttagacagagggagggagggagcaaggagagaggaggctttgctccctgggaacctgctgagctggcacttgctgctgcccagttactgtggcaatgtgcttaatgcagcgttgaaaatacagcatactgactcctctctcccgcctggcccggactccctctctccctccctgcctccctcttgtggagcgtgaaatgagattggtcaagataaaaaaggaaaagattcggttattttttttgagtgtggataatggggtctctcaatcaaaatcctaggctccagtctgctctccgcctcccgtctccaagccctccacattccctgctgcctgtttagaggggaaggaagtaacacaaggcacaatgacaattactctcctaattatgaatgattcttgggagcaggcttagggcaaggggtccctgggacccgagtgtgacctggaacatagctgccctgagtggaaggcaggggaagggtggtatccaggaagacctcacttagagcgggtgctgtgaagaagtactctctcacacagtagcatactgtgagtacacacacattcattcactcacaacacccgtcacatggattgcaagtgaattgcaaaagggaagggtctcaccataccatgaatgggtttctggtaagctgtgtacacgttagtttcaggaactgcaatgccattaaagtgaaccacctggttcttgagagcactcctacgtcaatggcttctgaaggaatggcttttgtggaaaaatgacatcatatctgtctcttaccaccacctaagatgtctcagttgactgaatggggattctttccattaaagtcagttaactcattaatcacctcctgcatacatgtaagacacgtgtaaggcacattaataagggcttcaaataaggcatatcagctacattcctcagtcagttttgtaaaggaatattttctgaatacctggccatttatatgcataattttatttctctttagcccttatagtacatcttggtggcttataatacaacttggtggaacccaagttttatagctaggaaaccaaggtttacgagaaccaaatggtgtgctcaggcatgaaactaagtgactaagtttttcaaacacaaatttattgatttaacgtctgtgcctctttccatcttccctcactgtattccatcatgccataaataaagatgcaacctgtggtctcgccctacaaacagttaatggctttcatatcagttataaaacagaaccaacagattagatggttagagtcatcctgacatctatccatgctttcttctatgcttctgttttctctttccattcaactatttccttttttatccatccatccatctgcatattcttatttatctatccttatatatacatgtttatcatctatgcatgctttcttctatgcttctgttttctctttccattcaactatttccttttttatccatccatccgcatattcttatttatctatccttatatatacatgtttatcatctatgcatctttctatccaccagtccatccatccatccatccatccatccatccatccatccatgtatgtcttttccttcttccactgtaaccacacttttacctgcctcctcttccagccattcccaatccattctctcattattaatatttctattatcctcacctttctattattctatccaaccttgaaccctactctatgatcactttgtcagttaacaaataccgatgaattaacaaatttctgggcctgcggaaaggcacaaagcacgctttgctatttgtggtgatggacgagcagtggacaaacaagtcaatggctgagtaagcatgttatcacaaaaagataagtaggaaaaggcaataaaatgtggtgatgcagtgaggagccatggggagaggagataactatttcagattgaatatacaggaagccttcctgaagagattttcaaagtggccagtcaagtgataaactgaggctgaccatcccttgccccaaagaagaccaagtgcaaaggcccggaggcaggaagagctaatttagcatggcagtgtacggaaagaagatgagcactggagggagcactggagagcaggggttgggtgggggactgggtagcagcagggatgggttttagaacacttctcagatgcttggggaaatagactgtagatacagagacaaggcagggggccattgctgatgtttttgtaagggacaacagttgctttagctaggaaagtagccttgaaggataagataggcactcagtatgctttggtgataagtggaacaaaacctgccagcaagttgactacagagaggagaaggagagatgagaacatggaatgggtgtctgtagagtgagcttgggagcctggcgggtggtggtgaatgggaaagcgggagaggacagggtgtgacggaaaagcaggagctctagctttggccgtaacagagttgagacaattaaccaaataccaagcttcatctctcagaggctttaatatggagctgctctaaacatcatttggagttgctgctattgaagagatccttgaaaagatcagatttggatctgaggcactaggtctaagcacctagatcatggcctgattgtaatagaatgtgaagaacacaggcagaaaaagaggaagtggcatccgatataagagcaaagggaactggactttcctaggcacaatggcttttcattatctgtggttatatacagacagagccacactgcaaggtgtatgtactatctacccaggtgctgcctctctatcttggcatcccagagactgaggcaaagatgcatgtagtgtacattaaataaataagtggtgggtgactaaaggcatagcgtttttgcaacctacttttaataagggttcaacctcttctctggtccaccacccagcagatgtagcggaagagaaaagttattaggatatgggggaagtgggcctgttcagcaatggttctttcggggcaagctccatcttctttggaagcagttcaggcctgtagcaaacaccaaatacaattcagcagcggcagaccagtcctctaggcaggccgacaccaggcacacaccaggtacagaccagcagccacagtccattcctttcagcaagcagacatcggacagctgtaattcaatcctgaagaaacttccagcctcaccagcgggtctgagacgaggcctcagaagcaggaagctgctgcaggaacctcacaagcagttcttaggggagtttctctcagtgacaaattatcacaattgagctcaacaatgccatataaggcaaaccaatacatgtgagcctttagtgaagaatagctaggcggagcaatccaaatcaaagctcagtgctcatctcccagggtctgtggggccgtatttatagtccttcaccacaagtccttctatatcaaaacatcctttcacctgtgtctgcttcaggaaaacagtctttcacatgtttgctttagcaagacatcctttcacttgtataccccagaaaaacatcatttggcataactaactctccaaagagactcgaaatttccacttcaggtgactggatgcatggacaggtgacagcaagagaggctaagacactgcatttctcaacaccctcctgtgtcctatagagattgcagtgttcagcactgggaagtcagacaaagggcgtaggataggacccttactgtatggccaggacagaactggcctcctccgagagaattctgagagcagggaaacatctgtacaccaacaggagacaggctcagttcccaccgtaggctacaggggcaagcactgggaggggagcacggtagctaggtttcattcaattcaggctcctcttgagcgtcttggccttggaggaaaagcctggagccttctgcatacaagtttctccaatcctaagtaaatgattggattttatcatttcttagttttcctttcttctctattctcagccttcccgcttggacatgcattttcctccagttctgtgttgagatctgcccctaacccaaacactgtaagcttgctggctggtatggagcccttagacacagtgaggactcatcaaccttcccctatcgcaggcttccattcctcataggcatatgaccactcctccacagtgaagcagtgttgctggcccagtctaggctttaagatttgttgtgtgactgagctgagtgcccattgaactcttttatattttttgcacctgtttcaggagaaaaataaaaagaaaccaacatttattgataatgcctttatcaagagcataattctaagcatttaatattcactatctcacttaatcttcaccaaagtcctatgagatagggacaagagtttgcctcatatgataagcaaagtcactaaggcttgggagaaagacacacacacacacacacacacacacacacacacagagagagagagagagagagagagagagagagagagagagagagagagagagagagatccagcccagagctgaggagttttaaatctttattccaaatctgaaggaaggagttaagaagtcatgtaaaaagccaagttacttagctcacaatcacagatgagttgctaaaagactaaacatttttgaatataaaattgcctagaatctggctgggtttgtaaatgaagtcatctagcaagtacttgaaggaattacctggaatttatgatcaagagttctaaaatcaagttcctgctccatcattggtccaaagtgcaagctgagacaaatttcttcctcagtcttcacttaagtttcccattctataaatcggaagtgtgggagacgacttcataggacagttgggagagatggaaagggcatgatttaaagaaacatgctttgcaagctttaaaccaaatgataggtaagatagcctgctcacctttttgctgttgtgtaaatactttgacaaatgattcttttggaaaacccaaagactagctcacagaaaaagaagcccaacatccctcatataaattcaaggtctgagtttgcctaaagcaacttgattccctcttccactaccatccccctcttcctgccgtgggctcctcaggtaagtttcttctgtagaaagtccaagcagctcagaaagtaaaatttgaacccggcttctagagttttggcagtttccacactacctcagactttcaactggtgtgagtttctggagcctcactttctttatctggaaaagagagagtatgatgtctgcctcctggagctcttacaaaggagctgcccaaagtgacccatactgtgggacctcctgagctccactgtccagtgccacccatttttggactcagccctgtcagccccacagatctgtctccctgtcccaatcccctgcactggtgtcatgaacctcacaggtctcttgcctgtgtgctccaacaggaagtgaatattctggcaatgcctacagccacaccccgtattcctcctacagtgaggcctggcgcttccccaactccagcctgctgagtaagttcctggggttatccagaccctctgatgggcaggggagggttgggggaggggaacggagccagaccaaattgttgggagaccccaggttaaatgaaatgtctagagagatggcagttgtttgtcacagaagaaatcagcaacaggtcaccatatctggtaggtttaagggcgacaacagaaggctaaacattctacctcttttatatctgtcttctccatagccatgtctgttcaaattttgttttatgtaaaattcaggaatcaagccttgaaggtcaagggtagagaagggctaagttacactcaagcaaagcctatgaggggctgtcctgcctgtagggacttacagccctgccaggagataatattcaggagttctctgcccactgttagctgctcatctagataggttgaaaacagttatgagtaaccctccacaaaggctttgttccatttggtttcttgtatttggcttgagaaatgagtataaattcagggtttataccttaaaagtgagtttcagcaagtttttagactattttttttaaccccttcatccctgaactgtttggggacgattctgaggaaaataagaccacaatggagttcttttagagccttcttgagtggtagccctatcagttgtcagagcaagtctgaaccagagagaagcaatggtctcaaagatctagttttacagataccttgacaaactggctggagcatctgctccctaaaatcccttcccctcttcttatatcttatagtcccagaagtgacccacaggggacttccttgtgctgttagacagataccttcaattccaagacagatgtgttcaactccacatttagtcagaaagggcaaagacaatgatgctgatggtgttaagaggaccttcatgtggagcttggtgggagtccctcaagcccagaacccctctgatcggccaggagaacaattcttttgggtgcttggaagagaatggtttggcctgccattatttaggtggggccagagagcaaccaagtcactctcattgtgctcaatttttgaggtcccacacataaatgttctctattgcctacttttaaaagcaaaagctcaaagcagtcatgagaagtagggggcaagaagctgtcatttttctggttagagactcaaaggtgaggccaaagaaagaggaaaggctggagagaagttaatctttgatgatcagatgggcgtgggggataaatgattaacttgtgctgtcttaaaggtcagcagatgtagaggaacgctatggtacaactttccctctgaccagcattgctgttgttgttttaatgtgtccaggttctccatattattacagctctacatcaaggccaagcgcaccacccacctctgccacagcctttgaccatctgtagttgtcatggggacagtgggaagaaccaggcaagaatcaggaggacttggcctgagacaggccccagagagtcacacaaaggaatctttatttattacatgaaaaataaccacaattccagcattgccgctcactccctgtgtggtcaattaaatgaaccatgaaagtcaggatgaccttggagaaggccaaactgtcctccaggattcattttgtgagtgacaggagttccaggaaacaagaaccacccatttcaaaagagacacagaggagaaatgtaccgaagctggcacccaccaaaggagagaaaaggggttcacgaagaacttagagggagatgagtctgagggtgtacagggccacctgtttggtcttcatctagacaactccagcaattatgaacagtatgcaagtccttctggcctacaatcacagcctagggccaaggctctacgtgtcagtcatcctagcagttaccaccttgagcctctactacctgcatctttctggggattcagctgaccttctatttccagttgctgtgcatttacaagcaccccttagcctctcaaccagtggctacccctttggcagcagcgaacctgtcccctggaaagttcagtgaggctctacgtagaacataggaagacacaacagatgggaccagccatgtcctctcctcaacagccttgccaattcaagtgtgctttctgcagttccagcccgcgcagccactgaagagacccccaaggccagcaacaagattccctctctggctcctcagctctttccccacatacaacctcactgtaaataccgtaaatgaaactctgtttcggtcaagctttcctctttccatcccccagtctttggtctctgaaatatctccctactatgttggggttttctccttcatactttttttttttaaaaaaaaaaaaaaagacaacccaccattaccacatgactcaataaaccattactcttggtctcaggtt

SEQ ID NO: 77 - DNA, 62049 bp, Pan troglodytes
  variation 7234..8047: note = n is a, c, g, or t
  variation 9270..9943: note = n is a, c, g, or t
  variation 33654..34758: note = n is a, c, g, or t
  variation 37482..38072: note = n is a, c, g, or t
  variation 47780..48120: note = n is a, c, g, or t
  variation 49713..50615: note = n is a, c, g, or t
  variation 52759..52768: note = n is a, c, g, or t
  variation 53852..54898: note = n is a, c, g, or t
  source 1..62049: mol_type = genomic DNA
ggatgggaacaaacttcagaaggaggagagacaccgggcccagggcaccctcgcgggcggacccaagcagtgagggcctgcagccggccggccaggtacgtcacccaggggttagctggaagccggctagcagtgaggacgggggatggaagaaaggagagggtcccaggaagcctggcagccttttccctcccaagttaaacgggataagactgggacagcggagggagtgggcacggaggttggagtctggagcgtcttcagcgcactcccaatccttgatcctcccgggaagcctgttagctaggctaggctgaggttggccctacttcgcctaaaaatcctcctactcctggcagacgatgcaggtgtaaaggataaggcctggggagggggcctgaggatgcaggcatcgaatctcatcgcatctcatgcccttctcctgggtttgtgcagggcagcggcaggcgcggcccggacctacgtgagtgagccccgagccctcggcgggctgcgagcgactccccggcgatgcctcacaactccatcagatctggtaagaacgcggtgtggtcaggacccccgagccgccgcgccgctgagcgtccgtgcgtgcgctcgggtggttggatctccagagcgtaagcacgggattcgcgggacccacccgcgtggggacccagctgggggcgcctggggcctggccctccgctggagccgcctcgctgttctcgggcactggggttccacccggccagctgagccgcccttcccaggtttccagggaccccatggaacggtgaggggatctctgtggagttagagggggtttcctttgagctccattcccagccttgcatggcgcattagtgtggacattcttcgtgctctgtccctgggctgcaccggtgctggacttgccgtttccccgtccccgacctctaagtcctcttcctcgggtgcgcgcagtccttcccagtgactcccctggctggactgtgagctccccgcatctctcaagccaacggcaatggagccggtggtcccgggcctgggagccggcagcgcactcaggtgctctccgactcctcctggcccagcaccgggcaggcagggagccgcgcgcggggcgtccggctggtgaggactaagccgctcgcggagtcaaaaccccctccccacctgcgcccggaagcagggccttcaaaaacactcaagctcccaggccgcgatgcctgttttcccccttcccggccagggctgggcagggtcttcgctgggaaggagctccagggtcagggctggtaggtgcagccgtccccgcgcgcagcgagcgcggacagcggcggaggcgcagcgcggcccgtagtgatggatggagcctggccggccgcacagaaggcgatttatggggccagggcgcatcgctatcgatttgggccggcgaagtgagaggaaatcaatatttcagaatgaattctccgcgaatatgaagtcccgctctgcaaacgggacatgtgttataataaggagggtcggatcgggcgcggagcgaggctgagatctctatttagccaagcgcactgcgggggcccgggctgtgcggcgcagtctccagtcccagggccagggctcaactaggaggggagcgggaaccccctggggcgccggaagatttctcactcgggttctctctagagctgcagacgaatgctccctcccggcccccattcccctcagagacctgggccagaatcgtccggctgcccccagaaggcgcggggtcccttcaaggtcctcagggtagagacctcgcagccattccccggcgcggcggggttggcgagccctgggaccgagcagagctccctggcacctctttacggtccgcgccctggaaccacgagcgctcctaggccattgtctaaggtcaggatcaggttttagtcccttaatctttagccaaaccgtggtacgataccagacatcgccaggaccatccctgaggcctaatgtgcagtgcccggtgcccatgccaagctggtccaatggcacttctgctcggctctggaggtccatctttcctcctaaccttcccctgacccttccggcggtggcaggaggagtgggtgctctcggaaatcaaattcactgtggccgggctggacccttactctctgccgctgcccaagaaatgagacgatgtccccgtccctcagatgagttttttttttttttttcgcggctacttattttcattctagaagtactcgttagaatagatggaaatagagtatggaaagagtaaaaaaggcacaatttatttttactgtagttttaatcagtaacagtcccagatgatgagatgcgcgctttcccactagcttggatgcaaatcgcgcttgggttttgggagggagccctctgcccctggacctaccaggtaatttttttccccttcttcttttcgggaagacagaggggcttcttctaccccctttccaaaacaaataaacaaagtggcgagggagggaagatgagactttcttctcatagtttaatttaaacgctaataaaacaagaaaatggcctataacagcatagactgctgaaggcgctccctgtttcttttctgaaccctccctcggcaaacctgagggagaggccgtctgtctttctgatcagcttacctgacactgttgtctataattggagctaaattcataagcgcacccctcttgtttttacaagcccattttctctcgggttgtagcagcttcccccttttccccaggcacccctattcctgagatcggtagtgcttagggagctccccttaagtgttctgtgagcagagcccgggacgcgggcagccacacggcttttcgcgggagcgaggccgagcgcacccttcccaataaccggagacgctcaggaaaacttccctgcgcggcccccgccgcccaggctgccacggctgtctcgcctcgtcgctggctggtcttgccttgcagagagtcttagcattgtctttcctacagctttattctgaaggaacgttgcacgcgaatcattttaacgtgcgcaggtcagcgatgggctgaacgttccttaaaatcgctatttttgttgcatcagggacgaaattctctaaagcaaaaacattttttaaaaaattcgaagatgcagaagaaatgataaatgccccatatctataaaagtgaaaacaatactgtgccaatgaggaagagagttttgtaaaagcaagcaggctggctgtcattaaaagttatcttaaataacttgtcgcagcgcactcccaccagccctgaaaatagttcattcaagtggtaaaataagacaaggcagaggacgatgtctctaacttcccagatgtgagatctaaagccccattcctaactcttggttttagaattgaggaaagtggaataaatgcatttggaaaggatctgttttcttcccaggtttcctgcctgggttgaaaataaggtttcagggaatggaagcaactttgaggaacataaagaggtattggggttcatcaattcatctttgtttcaagatggtttatcccccccaccctccacaatgcaagttaattaggagataatttagctaccttgtgaattagttttaagataagtatctttttaagctttgtcactttaattgccccactgattgataagaagtaattatttctaattgacacttttttgatgtctattggaagcatttatttggaactttttggggtgggaaggaaagttaattaattttatcagtctacccccaaaaggactctgcctaattttgttgaagaagacaaaggaagtgaaggaaaccaaataaaaaatcaatctcatggaattttaattattaagggacactttggtttaaattagagggcatctactaatataatacgtcaaaacgttctatttatggcctcaaatctctaatttattgagatgcattttataggtattcattttcctatggatacactcaacggccctttatatgcttccttcattttggagcgggttcctctgctgtgtaaataatttttgtgaaaagtaaaatctgtcaaacttggtatgcccagaaaaaatgaaatcatttttgtaagagccaattgtaagaaagatttactaacagtcatccttgttctgtaattattgatggagttgggtataaaggtgaaactttacttacagtgacttgccttttcatacctaaaccttggagtaaacagtttaatcattcacatcctccagaacattttgctgtgagagagaaaggagtgaaagaataaggagaaaaagaaagacactgaaaggaggcagtgggggtggaaaggaaagaaagggacaaggtagctggagagaataaaatgaaagcattcatttcacaaatgaagatagccaggtgcgtggaacctttgccattcagtataagaaaattgaaatcctgctttcaaaatacatttttgttaacaccaaatctctaccacagtctccaagcaccccctaaccaccaagggatacccccacttttctacaccttaaaaaagaagaggagaattttaggaagctggctgatccggatcttggatatctggctgtcaaagtctttatttggggtccaggaaaaggaagtaagaaaacgcacattgtgctctgggatttataaagagattcgagtgttgcttatgtttattttattattaaagcccctgtgatcttcatctccattttgtatgcacaatcttttcacagatcgacttgtgacttattgatataggaaagcattcccacattaacccaaagtagagacacacacacacgcacacacacgcacgtctggaatgagagaaacacaatcacacaggacgcgttcctgtcaggttaatttcagccagtgcctttttcaatcatttattgtaaaatcttgcctgcttttattgatgtttctccctgattatgtggagctgcaagaatgaggaaatattttaaatgaaaaataaatttaagacgtacaaacatcagataatatcacataccaacctcactattagtgaaattgaaagaatatataaataatgcaaaaaaaaatcagcaagggagtttagtaatggaaaattcccctgcaattaaatgaaacagtaatttagtgaagatatgcctcaatgaattagcatttattaattggttctcataaaaacaatttgtgtgtgtgacttggggagggagatgtttaaagtatatattgtccatagataaagttcctcaaatattcatatcaaattatgtcgttatcacattctattttgtgagaaatcccaagtctttcactggcaagttacacctgtacacagagagcttgaatgcaaaggaaaggattcccatctagatccgaaagagtaaagctggttcccacttctcttggtacatttccaaatgtgaaacgaatgagggacacactggcagagtcttctatgcttaggaacatccaaaccgggccgcaagaagtctccctgaggacccagctcttctggggcacagctagctaagccagagctaagccagggctggtttgtggttctggtcccccagcctgctccagcatcctctccagctcaggcaggaactgcagtttgtaatctcagcgaggagcttgctagggttgactggtgcatggatgtgtttactttctctcgccacagttggtctgtcttcagttctaagcattttaaagctgctctatttatcagtccaagaagtgctgagttctccgttgagctgagaagctttgagctctatggttctgagtacacgagaagccagaagataaaagaaactgtttcatttaagaaaaaaaatgttttaaaaagtgggggcaggggaatgaatgagcccaccttcaagactgcagattagttttgcttttgttttagttgaaaacttggtgcactgccccacttcgggtcctcattctcttcagagatagaatttagtattgaaaaacaccctctaagagaggagaatatgccctcacgttatcttctcttagagggtgtagagttctttgcgggagggattctttccaaatgcagattggaacaccttcacccaggttcttctggggagggagctaacacattctgcctaggaaatgcaggcaatgactactttcagcaggagttctagacattccttttgtggggaaggagtacagagcatgacaatccaggagtctcttggctcctgaaaactccactctgccacaccaatcctagttcatccagtcagtggtcagtgaccctgggatggatggaatctctgcagtgaggtggagtaggaagaagcatccgctcttctttgtttatctacagtaatgacacttttaaatggatcttgaagattcataattatttccttaggtccagagttagggctgacaagactgtttgggttgctgaaagcccccctagaccccttccttggccagatagaaatacaatgagcaaatttctcttatataagccactggccagaaaaatattcataggaaggcgtctgtcttaaacctgtaattcatgtaactgagtctgggctttaccttgcttggctggtgggggtccttccccaggaatgagtctcgatagaaaccagcatctctttactgaggcatgtctaagatcaaggggaagaaagtccaagagtccccgaaggatacttggattctgtttctgtgtttcttcccgaggaccctccatagtcctgagtgccatataagatgccagcaatccctatgggtcaggcaagccagcctcacagctcctcctgctctgcccatgtcacatttacatccaaagaaaaagaatgtctgcacaagagctgagcatacctggcacttagtgagctgtcaatgaatggaagctgtgattcttctctctgaggactgccacaggtgtggtgtggtgctgagagcagatgtattcatcatctcatttaattctcacaactctgccaggcaggtattgctacgacatttttatagaagagaggggaaggaactggtgttcaaagaggttgatatgactccaattcccctttccactgctccctacctcaaggcacccaaagtccagctcatcagaactcggctactagatgatcgacacctggaatcctagtggaaactcccnnnnnnnnnnnnnnnnnnnnnnnnnnnnnnnnnnnnnnnnnnnnnnnnnnnnnnnnnnnnnnnnnnnnnnnnnnnnnnnnnnnnnnnnnnnnnnnnnnnnnnnnnnnnnnnnnnnnnnnnnnnnnnnnnnnnnnnnnnnnnnnnnnnnnnnnnnnnnnnnnnnnnnnnnnnnnnnnnnnnnnnnnnnnnnnnnnnnnnnnnnnnnnnnnnnnnnnnnnnnnnnnnnnnnnnnnnnnnnnnnnnnnnnnnnnnnnnnnnnnnnnnnnnnnnnnnnnnnnnnnnnnnnnnnnnnnnnnnnnnnnnnnnnnnnnnnnnnnnnnnnnnnnnnnnnnnnnnnnnnnnnnnnnnnnnnnnnnnnnnnnnnnnnnnnnnnnnnnnnnnnnnnnnnnnnnnnnnnnnnnnnnnnnnnnnnnnnnnnnnnnnnnnnnnnnnnnnnnnnnnnnnnnnnnnnnnnnnnnnnnnnnnnnnnnnnnnnnnnnnnnnnnnnnnnnnnnnnnnnnnnnnnnnnnnnnnnnnnnnnnnnnnnnnnnnnnnnnnnnnnnnnnnnnnnnnnnnnnnnnnnnnnnnnnnnnnnnnnnnnnnnnnnnnnnnnnnnnnnnnnnnnnnnnnnnnnnnnnnnnnnnnnnnnnnnnnnnnnnnnnnnnnnnnnnnnnnnnnnnnnnnnnnnnnnnnnnnnnnnnnnnnnnnnnnnnnnnnnnnnnnnnnnnnnnnnnnnnnnnnnnnnnnnnnnnnnnnnnnnnnnnnnnnnnnnnnnnnnnnnnnnnnnnnnnnnnnnnnnnnnnnnnnnnnnnnnnnnnnnnnnnnnnnnnnnnnnaaaccctggttgacatttaaaagtctctgtgattagctgagcaccaaatctctgacttaagctttgctttgctcctttgcttcaacactgagcaaggtagaaggcacctctacagggcagggagctggagtcttgctcttccctttcaagaaggcagacccgcagaaccaggaagaagaatgatcagacaaaacaactcagtggtaggaaaaggaccgaacactaacaacccattcggcaggagcaccaaagttcatttatcttgaacagtcaccccagcacgactatgttgtggctgttgacaggtaaaccccatctggctttctcgagtctgctcctcattgttccagagctggtgtgctccatgacggtctacactggggctccatctcagggctgctgggcagtttgtggcaaaatgtggcagggctgcaggtagaagtgccgtggagacacttctgccaaatgaaaatggttactggacacttccaatgcctaggctccatgccttcacagatatgcaaactttcccctctgtaggccttacatctctttggcagtatgaaaagacctgggtccttcgagccttggggaccttcctggaccccccatattccctggggacatggcagtaccccataccaggaaggtccccatggcccatggcccaccccgactgctggccatggggctgtctagacaggtgccccacactgtgacaggcctgcctgggcctcagggctcccccttttgcaggtggcacctgctttcaagggtcctgcttacagggacatagctgctgtcctgagactctcctttcctcagggcctggctgggggccatgccatgtctgcaaagcacttggtcacgtgctgcccacattccagctgtcctcacccatcccagctccaaagccacctccccatgaagctgtccatgattcctcttcctcttccccacctccccaaggtctcctagcactctgtttgtatggcatgccttgcagtccaatttttggagaaggcttgatctctgtggctcgcagcttccagacttaagttacttgagtacctgggacaatgtatgcctcacacatctcagaagcttcataggctttcattatgctggtctacctggatccagagttgttcaaggctagagggggctcacagatgagattctgtcgccacatcttaccagtgaggaaactgagacccagagannnnnnnnnnnnnnnnnnnnnnnnnnnnnnnnnnnnnnnnnnnnnnnnnnnnnnnnnnnnnnnnnnnnnnnnnnnnnnnnnnnnnnnnnnnnnnnnnnnnnnnnnnnnnnnnnnnnnnnnnnnnnnnnnnnnnnnnnnnnnnnnnnnnnnnnnnnnnnnnnnnnnnnnnnnnnnnnnnnnnnnnnnnnnnnnnnnnnnnnnnnnnnnnnnnnnnnnnnnnnnnnnnnnnnnnnnnnnnnnnnnnnnnnnnnnnnnnnnnnnnnnnnnnnnnnnnnnnnnnnnnnnnnnnnnnnnnnnnnnnnnnnnnnnnnnnnnnnnnnnnnnnnnnnnnnnnnnnnnnnnnnnnnnnnnnnnnnnnnnnnnnnnnnnnnnnnnnnnnnnnnnnnnnnnnnnnnnnnnnnnnnnnnnnnnnnnnnnnnnnnnnnnnnnnnnnnnnnnnnnnnnnnnnnnnnnnnnnnnnnnnnnnnnnnnnnnnnnnnnnnnnnnnnnnnnnnnnnnnnnnnnnnnnnnnnnnnnnnnnnnnnnnnnnnnnnnnnnnnnnnnnnnnnnnnnnnnnnnnnnnnnnnnnnnnnnnnnnnnnnnnnnnnnnnnnnnnnnnnnnnnnnnnnnnnnnnnnnnnnnnnnnnnnnnnnnnnnnnnnnnnnnnnnnnnnnnnnnnnnnnnnnnnnnnnnnngattaaggctagagggggttacggatgagaatgctatcgccacatctaaccatgaagaagctgagacccagagaggtatgcccccgaccctggtcccacagcccttgtggcaaagcagacactccatctcatcaccaggacacttttcatgacccctgtggtgacttccagggcatgtttgagttagagtaaggactgacccaacccagggagcctttgctgtggcctctgctgcataagcaggacccaaggaaatgaaggggcctccttcgcctgctgacagggactgggaagcccagtgacagctgctgagacatacagacacacacccatgcacactcacatgcatgcacacacatacacagcatatgtacaacactcacatccaaacatacagacaaccagggggattagggtgaagcaggaaggcactcaaggtgcaaaattccaggaggctctctctccatgtggtggattcaggtagggttggccctgagagcaagttcctctataaatcttatagcctggacacctggctgtcctcattctagtcccctgtatcctttagacacacacagtcatatccagttacacacacagaccacagtactcacagacatatacatgcacacatgaatacaatattccccatctcacacacataaacatactaaaagtaagcctttaaaatgtagaagtatgtgcagaagactgtcctaggtctgtgggtaatttaaaaagaccagagaaggccctgctgtcagagaccctgagaaatgcagctgggaagttacaggtgtgattgatgagtcccggctgtactcacagttgctagaaaggaagtcataatcgatgcactggggaaagtagggtgtaagctatccaggaatctgctctgtgctgtgcatctatttaggcatgaggtcactgacatgtgacctccctgttcttgcaacctgtggtgtaaggtctgagtagaggaataccagtgtccaaccctgagcccctcctggccactagcccctcactgaagtgacgggtcatgggtagtcatggagccctgtagagaccttttggtccagcattcttgttttcacataagatccaggggcagccagtcatttgcctgcatcagcccctagcaccactaggtctctggggttcacagtggctcttccctgatgaggacagagctaccaagtgggcagcagcagtagcggcaggaactggcctcaaggtcccccaagaatgaagcactgaaggcaggtggctgccagctagcatgggcaggcctctctgctcagctcaggatattctctctaacattctgtccttgctcagaattcctgggccactctgcgcctgagacccctcagccccaggcagttcaggcatgctctgtctactacactctaaaggagaagtgtgaacacaaaccacagttgcatgcacaacaccgagcttgtttctccacccacatggactgtatttgtcactattatacacaatatggtgccatcatgcatattttgtacatttgatcagccaatatttatataaaactttcataaacactttcaaacagttttaccccatagggtgggcagaggtgcttgtcaatataataaaactgaacaacagtggtagaaaaaggtacacttgtacttatcttcaagtttaagatgtaaattttttctgttcaatggccactacctcatattatttttaggatctgggatcggacttagcaacacattatgactttcaagaagttgagctcactgttttgtggcgttctttgcagaacaccgtgaacttccgggtgccccatgtgctgacaagtgtcagaacagctggtgtccagctgacgtgaggctggacttgtgtgataggcacgttgtggccatagctccccactctgtgaaatgatgaggtcgacatgcctccatccatcagtaggatccccagcatggagaatttacaccatcacccttcaaagaaaggagccaagccctgggcacctcctctcaccttgactttcctacaaaacacccttctttcttggcaccagtatagcacatgtgtgttggtcatttaggagcccaggtgccttgtggcagagtaaagacacacacagaaaggctggtcttttcttactcagcatccctggagcacacccggaacatgatgccttccttgagatttcctttaaagaccctgtcacccctgaggtttccatcccagctacctacagaagtcgtgatttcttttgtctttctctcagcttcacagacttcttggtccaccatggggagggcttctattcccagtcatccactgtcctgtggtgaacctctctcctctcctcctggcccatttctctcccaagtgtgtgctcagtctgcaccatgtggccagatcatcttaggttttgatccagctcctaaagaagcactcactgccccttcactctctcactctgacttcccagcacttgggttctttcccagcactgcctctgcgtctggagtgctccatgcaaatttctcaccccaactgctggcatgctcagttacctttagtttttatgatgtgtcctcacccatcccctggccacacaaggctcaagatctaactccaaattatttcaaagagcattattactcaactattcaatttagtaagtcaatgtctactgagcccctcagtgtggcaggcagggagttaggctttggggttatggaactcaggagaccatccctctgccttcatgctgacattctagagagaggaaagcaaactgaactttcaccacaatcacagagagaaagcaaaggcttcagtctagatagacagaaaatgctgagcaagtaggagagggaggcatgctgagctctgaccgggtcaggatgggattccttaaggtggctcagaggagaaaccagccccagcagagatgcagagtcccaggagggtgtgcaggttccaggcaccagcagtcagccctgaggggaggagacagcaatgggaacatggtcagggttcagcccaactgcaggggttgacaagagaagctaagctatggtgttaattccaacgtgccatcagaacgtctgagtaaagtgcactcgatgtatacgttttagggcattttattcacttgtgcacgaaacttccatcctcccctggcttggcctcacgcttctgttgttggcagttttcatatccttcttggctcttttgccgcagctgcatacctactgacgctgttgtcttcaggttttgcggtgattttattaagtggaaaagccatggcaataatctgtgatagctaggttattcactttttcaaaatgttctggtttctctcctctcttggctctgtttcagacaaacttagcctggtgattttccaaaataatcagatttctccttgcacttccttttaatccaatcattaacaagccattttcaggcaaactgctgatgtacaatccgaggagactttctcctacctctgtggcctatttcccactatttccgtatgcaaacccatgttccagccagctagtcattgtttccaaaatacaccatgtacattctcacctctgtgtctctgcccattcaatgcagctacctggaacacccttcccactcccactcccttgacaaagcctcagtcaagctccacctccttcccgagacctttttagacactccctacctttagtgaccatcctgtctgacttcccactgcacctgctccactccctgggtactcagtacctgttccaacaaatgtcacttagcttcttacagtgacaacctgtctctgagctagaaaagaataagaacccttccagatctctctctatccccagcaccttacacaaaatcctacataaggagtgaggactctacaaatgtctgggctgctggttttcacctaattctccaataacattttttattgcttccttggttgatgcaacttgcacatttgagttttgtataagaagtttttccaacatgaaatacacctgatcctttcccatgatattgctatattacttttctattttctttataataattggcaatgagggaactgagaaagcaagaaatgcagcctttgagggaacctgatgcagccattcaggccggagctgccccactgggatacctgcctggtcctagaggcatcttgtaggcacagaagcctatgcttgaaggccagatagccaggttgagcagcaatgggcactgggagtaaaaaacactggcaagcctggggagttctgaaccaacaagggaccttcctagtggatgctgggtgtcgacttggcggggtaattggtcagatttagggtgagagcatctgtgaggataaaagattacaagattcctgtaattcctgcagactgggaatacaactccaaacaatatctagcacatagtagacatatactaggtgcttcacaagtatttgtaaaatggatctttcttttcttcttttttcctctccttcttccttacttccttttttcttcttcttctttcttggctttagataactgtttctcaagtgtggtctatatcaaaacctcctgggatttttgttagcaaatatggagccctggaatctgtatccttcacaagctcccagggacttttttatgatcagcatttaagaaacactgatctacagcccacccacagtctccccatgcggagtccctcatgcctgcctgctgggggcacacccttctttttgcactgtgcctcctcctcccagagatctcccatctggctatgggtagaagcagatcagatttgaatgcagtctcaggtctgcccctaactggctgtgcacatgccatttgagcctccgagatggcatctttatctataaaatggggcaaagtgccagccccacctacctcatgggattgttgtgaaaaccaatcctggatgcaaccaagtccaacaactggtgtttgttgaactaaatttaagaatcacttacttgacagtactttggaagggccctgtggatgtcaggtgagtttataaccaacatttagactggatccagggtcagaaagttcttgaaaggaggagaagcctggaggttctggtaattggagggaatccagcctggcatttggaatatttgctgtgctgatacactgatgttctttcactgaaaaaaaaaaaaaaaaacattgcaacatgatgcaaggatcacaaatggagaacaagatgatgaacaagatggtagcaagtatagtaatgtcaagagaaacaggttttcaccaaaagagggtaagctattagaaaggattttaccctctacttgactgactgaacctgccttacacttaagagtcatttggagggaactggaggggcagccagttaccctaggagagcagcctccaggggctgcccgagcctgctgtgtgaaattcagggctaaagctctaaaactctattgatccgtgcatgcgtttgctagcgctgcagtgacaaagtactacaaactggagggcttaaataatagaaatttattgtttcacagttctggaagccaaaagtgtcaaatcaaggggtcagaagagttgtttccttctgaggctggaggagaatctgttctgtgcctctctcgtagctcctggtggtttgctagaagtctttggcattccttggcttgtgacagcataactctgatattcatatggctttctcactttatctctgtatccaaatctccccttttcacaaggacttgatcatattggattaggcccaccctaatgacctcaccttaactagatcatctgcaaagaccttgtttccaaggtgctagggtggtgggtggagacaggggaggggactattcaattcataacacctaagtattgtgtgtccttagtccgtttcagtccccacccagccctgacttgactctcagctgctttgggtctgagcaacaccactgcagaagctctgatttggagctgacagaaaaagaaggggaaggtgacatccatcctccagaacccttcctattgctccaacagagaaggggactccccctcccaagccagaatccccccaaagagagcctgaagtccaggttcaacacttagaaaaggcgagtcatggtggctcacacctgtaatcccagcactttgggaggctgaggccagaagattgcttgagcccaggagttcaagaccagcctgagcatcatagcaaaatcacctctctacaaaaaataaaaaacacttaagaaaacaaaaaggataagcaaacaagctgatacaagaacctaaaatcggccgggcacagtggctcatgcctgtaattctaacactttgggaggccgaggcaggtggatcacctgaggttgggagttcgagactagcttggccaacatgacgaaaccctgtctgtactaaaaatacaaaaattagctgggcatggtggtgggcggctataatcccagctgcttgggaagctgaggcaggagaattgcttgaacccgggcggggcggaggttgcagggtttcagtgagccaagatcgcaccacttcactccagcctgagtgaaagagtgaaactctgtctaaaaaaaaaaacctaaaatctttcagggcatgccttgcttcaggacatgttctgtgcaaacctcactttcttcctccactctaccaacatggccccagccaagaagccactaagctcccaaagggctaagacagggatttaggtcagaacgctgaggttctttcttggttctgccatgaggtgaatctgtgacattagacagctcacctctccttcctggtcaaggatcctctcagaagtgtgccttgcaactctgccactccatagacactgtgcacatccaccttcatagtctgtaagccgtggcagcccactttgtcaccatgcaagtcatgtggcagcccataggccccactgtgtgctaccttccctcatcttacggcacgcccagtgtcaccactggtgttttgtcacataggaaggttactcaatgtttccctctagagctctctctgtaccagcttctgggggtttctggcctctgttccccggctgagggcagtcccagagttgtagacattaggactggaagcatcatctgcttctgtcaagccagatgaaaaaactgaggcacagactggcatcgccacagagtgggcagaacctaggcctcctaattctcagcaccccctgtttcctctccagaaactgcagcctgcaggctgcatctgctggcctctgtcccttccccttttcttctgccgcagtgagggcagcttttagagtggataatctccttcgccatggtgcctgctatcgacaggtgtggaaacaacagatgcacggttttgtcacagactttgctcctgtgtgtcgctcaaaaaggcggttccccttcatttgttcttacctgttatggtccccaggatggccaggccctccttctgtcccccaccctgaagactctgcaactcacacacacagtcacacacatacacacacacacacacaaaacagtcacactctctctctttgcactgctctacccactgcaaagcacgcctgcatggtcagatgaaagctgcacctcccctcaaggagccaggcgtctgcggaaagaacttgacaacgagattcaaagagaggacaggggctggggaggtcggtgggaggatggagaaggttctggaaggttgcttctgggaggcttctctccctgggcttctgaaggccagagtgcagggtgtggattagccatacccaaagccacattcacagagggggaagcatcactcctgcaggaaggaaaggaagtgagtcccctgcttgggaaatggtgcccaatctcagagggagaaagtggctcatctgctgttactttatataccttatattgctgatataatttataggatctaagacagcatgaagagacctccagaaatctctgagacagcaccaaaggcaaccctacccagggaacccttggacttggtgactttcaggctcagagcagcccatgtgtgtctcacttgcctcaagctctctggcccctgtgctcccaaggtctccagcttggctccaggaaaaggcagggcctcatgtcaagtagtacttttcttaaggagcttagaggtctattgacatttgaagcagctccatccctaaaaatccacacactgaagcccttcttgggagggaggtgacagggttaatctaagggctgggggaggcggagaaaggccttgaaaccacacagtgaagccaaccagattaatagaggaagagagaggggggtagaccattaggaagacaaagagaaaatcatgctggagcaatagaaagggaaatctaatatcaactagggaaaaataaatggagattagggcaaacaaattagctttaatgggttcaatgctaatacaagaataacagcggagctgcgaatgcctttgaggggaagatgggataaagaacctgagcagtcatgcaagcaataaagattatgcagggaagggggatggccaaaagagccagcagggagggagagagaagggaagactccgggcagatgggtaggggagcggtggcattggaggagtctgccatctttgacaggaaaggactggaacagagagctggtaagaactggagaggcagcaatcaggagggaaataaaagaaagcaaggaaactgggagacactgagggcaaggatgcaaacccagagccggaaagactgggaagaaaggaggcagcgatggatgtaaacaaagagaatggaagacaaccagccagtacacaagagtggagggaaataaaggaattaggtgcccgctctgactggagaaaatttaaaaaggaaaaattaggccccaagaaaatgaaaagctggagaggatttggaagtgtgttttggaaagcacccatacttggtaggtgacgaaaggacatattcgctcttagggcggggtctggctattcctggaatacagtgctgctgccaggggtggtgccggaggtgggtgggcaaaagtaagcagtgcacagcattcactatggcatctgagagctctcagcttgagtctcagtaatgccactttgtaaaggtggagccttgaacctgttacatgccgaatctgttcctcatcttctcatctataaaatgataatgtacttcatttttcaaagggttattataagaattaattgaaaagatgcatttaaaatactcagcttggcccaaaaataagcacctcccataatactggctataactattattcttaggcatcgactaatggggaagaggggctgggtactaaagacagctcttcctccctccttcccccacttcctcttcttttaggtccagcattggtgaaatacgagcctagtttgattctctcccagacagagtctaatccaagggaaacctctttatccatcctctatctccctcccctgtccctccccagctccctctcactattggggatgaaataataatgctaagccttccaccacagccaccctctgggctgatctaaggcagaagcatctaaggaagccaaatatcacattctattggaagaccctcttatatctgcctgagcctcagagtgtagtagacaaggagctggagttggtcctcatggcctcacatcttaggatcctcctgggatgcattaaagagcatagacaccccaccagggaaacagagccccaaagaccagcacacagcaacaataacaagctaggagtcaatcggttacagcctagtcatgggcactagaaggggaaagaaggagctgggattatttcctacccctccaggcatcccagaaccctgcccttttatcattactaaggattttagaagaaagagaagagaaatcaatccaggcaagaagaggggcagataggggtgggggagctttgccatttgctaataaataagttaattaacttgaaatcattacaaaaagaatcttcccataaaaccataacctccaagagggcagagacccatctttcttcatccccctatgtccccagaacctggaacagtgcctggtatggaaatggtgggtctcagtggtgagggtaatggctaacatttgtggacggtctactgaagcccaggtcctgtgtcaggtgctgcacctgcaccatgttatttagatcacttggcacacttagaaggaaagacagaaagaagtgacagaaattcatgccaaagtaataagttagtcagaggtgaagcaggggtttctgactctctcctccatatagctttaaggaatggaaataaatgaatacatgaacctcacccactcatcagggtaagaggacagatttgaaagctacctatcagtttgggtgttattctatatatatatacacacacacacacacacacatatatatacacacatatatatattccatatatggaatatgtatctatatatagaataatagaatatatgagggactgataaatgggccacctggcaagtagtagaagtttaaaggatagtggaaggactttcttcttgttgttgtatgtggctcttgtcagccaatacctcagcagcagtagttgaatcagattccagctctcagctctcccagagccagcctcacatgcccccagcaatagctgggatgagccagcccttcggagatccaatccccagctccacaggctcttcctctaagcatgtagttctgataactccagtttcttccctttgcttcctccagcctgaggagcagtggttgcttcctgtagctactatctctgggctatttcagtgtttcctttgtgctcttacagccctccaacaccagacaacaattccccatattaaagcccctttgttgaaatacctaggaaggtttctgtcctctgaccaagccctggctgataccagaagagatctgaggaaaccagattttaagactggattgatcatgtccttggccttgaacacagtactgagctccttgacaatgagaactggagaacttttttcttttttctttttacttatttattttttttactgattgatccctggcaggcatatgcatgcagcactgcctacacagtcctgagtcaaaaacttctcatggggtctctgagtctggaatgtctgagttctcaggaggggtagcatttgctgctaccctctgcctccctagcttgagctgtctctcgtggttttcccctgatgggatgttaacatcttcccaacagagctaccaacccagtgagggaggagtctgtgtagatcacctcccatcattctccatagagtctctatggcccaggttagaagaaaaagacttcttggctcagactccaaagactagagtcagtgacagtttccttagtggtgtaaaagggcaagagtagcactaatctcacagaagactcctgcagaacacactgccacattcaaccataaagctgctctcaacagtgtgagcctggcaagcactcacgcatttaatgttgacgttgaaggtctgatatgtgagccaacaggaagacctctgcattcatatcctgactccttcggaagcagggcaaacctctttttttttttggactgtggaatctggaccgtcttctttaaataactcatttctatgagtatatgtgtccgtggaaaacagaattctgtttaaggcaaagaaggtgtgggcttcactagacttgtagatctgcctctctccttccctccctccttccctctattcctctgtccctccttccttctttttttccttccttccttctttctgtccttccttccttcctccttcccttccttccttccttcttcccttctttcctttgttctttcctttcaataaccaacaggcacttatattctgcttaatgagattatgtcctggcttatttaaaagaaaggaccaaagagagcaggcagggaaagccagggaagactttctgtaggagggagcttcctgaaccaactcctaaggcatgaatggaaatcaatcgggagaaggtgaggacgggcactccaggcacggaggacacagtcaaggacccaggagaggattcagatgcagcgaaagaatggcaagcaattctgtgctgttagggcatcaggttcaaggctcagacaggtaagaaatgaggcttgaacactaagtcagggtcaggtagtggtaggcattgtctacaagatttagtagcttggactttgccatgaagaaaatgatgccatgccttgcaaggattcttaaatatgggagtgatatggccagactaggatttagatgtgttgctcccgagctgggtagcaaaggttcccttgagcaaggttggatgtggagaccaatgagtccaggtgagtagttaactcctactcaccttccactcaggttacatgtcatttagagacatcttcctaatcagcttgagctcattttctcttgcacccccaccccattattttttaacaccgcaccctgttgtgttcttcttagcacttattccaaatagtaattatacatttatttctgtatttactttttaaatatatacccatcttcagcctacctatccctagtctgaaagctccatgaagatagaaatcaattctatgtaatcagttctattaaaatgtttgctacatggtaggcatataaaatacatgtagaatggataaatgaatgcaggaatatttgaatgctggggacagacaggaaggtattggttaggtaaatatttaggaggtaaaacgtggtcttgtgagtattccatatgcagagaatggaaaaagataaaggctattagttgattcatgtgacatgtttactgaacacctaatataatttaataatgatcaaaacgaaagaagtcttgccctcatggagctttctatctggtgatagaagacagttatgattcatacatatatagttatgcaaaaaatgtaaaattaaaatttggacctaaagatgcaattaaatttatctatgatacctccccagtccccccaaaattcctcccttgactatgagacattttcttcccctcattttcaaccagattccaaacagcagttatatttgatgctacctttctatgacagccattcaagaaaggtaaagcatgttattagaacacccaaacagaagcctgaacctactctgcaggataaagcaaagccaccgaggaagtgactcagtgctgaaatataaaggatgagcaggagttaactagataagacagggagacaagagctccaggaggagggaacagcatgtgcaagtgccccaaggctggggacacactgttacttccaaggtcgtgcagaagaccgatgacagtgcggtgcagagagtgtggtggcaggtggcaggaggctgagtggaaggggcaggccctgagcttgcatgacagctggtattgttaccaaccaagacaacactagaggaggagcccccttatcacctaagaggaaatctccaatagaaattgaaaacaaaagttgggggaaggacctgacttgggttacctgggatgcccatgatgccatcatgagatgggtagtaggtatgacaataagggtgtgtaggatcaccaaggatggccttgaagggggagagaaacactgagaactaagagaagcctgaagggagaaaacatatgtcatggagcatataagggaagagaaccccattaaagcaaagcaaaaagcctagactgaaggtataaggaatcaggagatgggattgtcactaaaatctcttcaagagggagaacatggcaccctccaaccactcactgtccatccatggccactcatcaccaagcacatgctaagcaggaggcacagagcaggctgagcactgaacgtgaagggaggaatgggctgcaagtatagctgctttttgagaaatttagttgaaaacaataggaaagaagagtatcatggtcaagggaagaattttttttgtttaatgtattttgaggtcaggggctggagaggcaacatagattaatttaattccatctgtaagtttaggggaaggacctggtataaaagaagaggtaagtaatgtttttaaatgggaggataattgacggagtaggattccaggacaggtagaagggcaagagatcaatgagaaacacaagccgcagctctgcctagctgctgtctttccgctccagtttcccttaggaagacaagtgtaaggcacagaggtaaccaagggtcatgcagcaagttgggggtaacagcagatgcaggatgctgctttccagcatgccagcctcttttacccagtccaagggtctcatgtgtccaggtaacccataacctcatgtgtgccggcatgatccagtgtgcagactttggacactgggattccatggccctgggacactttcttcaggagcagttggaggcacagaccctggtctttactccagaaaggcaccaagccaagaggattagctgggaggtggcacatggagatcacagacctgcaagtgagcagctggggaaggcaacaacaccaagctgagaatgccagggactgattcgcatggacaaggcctttcctttgtggaaggcgtataggcctggcatgatttgaaaggcacccaaagaggccactgcacctctcactatagccctgccaaggctcaactatcaccttgacactctatgggactaaagcaaaaagccccagatagttaaatggaaatttttgcagaacaacacattgagccattgccactttaggactgggcagagctgcaaaagataaagcaaaaggataaagaggaaagtactgaagcgtgggatttgggggtcccaccgtgcagaatcatgggaatccatgcaacaatcataaccaatgtaaaccatttttctaccacttgtatataagaaaacactaattacagtagacaaagacagggccctgcctttgagtaactcataaagaaactcaaatagagaaagttactgttcaatgcagtcagtgctatgataggaatttgtgcaaaggactataggaacatgcagaaaggatttccacatcttaagcgtttggatattggcgcatataacaagaattttggtcaataagtgtctctgttttctttctgccatcccaactactcagagctctataaaggatgaagaaattaccaacaaagtcctaagacctccctgaatggtcacttttcaaaaggatatgtttctggacagcaagcttcacctagacctttgctgagctccaatccctttactgtacgataagtcctctctgaccccaggaaagcttgcatttcccgtctgagtacctttcactcaggaacctgcttgcatccggccaggcggtcttgtcttcctcccccatacccaccccgcctccccactcacaatcctccagacatacaaagagtctttgcttatgaggcttcaaacctcttcctgggtcacaccttcccccctcaccccacttcccgcccaaccaggaggctcctactcatttttggcttccggcctcaaagcccaccccacctgcagctgcatgaagaggtggtcagcacagtgggcgccaatcgtccccccaacccctgtgcaggaaggaagtctgcacccacctctgggcatttggtggtgactcacccagaagagtccactcccccacaccggacacaggaaagacaaaagtctttccattgcagagactcagcttaaaacttcaaaccataggggccatctccatctgcagccagcaggctctttccaaattctctttcctgcctgtcctacagccacactaaatgtctttcaatttcttgaaggcaccaagacttagtgcatggatttttttccccctgaagaaaattcttcacctagttacctcctagatactcttccttgcagcttccctctaaccacttacgggtctccccaagcacctggacttatatccttcaagaaagatcaccattaacatggtgattcctaatgtgtcttatatcccccaaaaggttcgaagttccttgaaggccaggattcttgtcttgttcaaggttgtattcccagtgctttgtacctgagtcatgataggcacttggtcaatgtcttgagttgaaaagaaatgaaaaccataatatacaaacaatcattattattgttagaagaatgctggaggagtatgaagagttattctcttatgcttaatttaccagccatcacctggcctaaaccagtggttttcaaagtgtgaccctggcctagcagcattatcaccatgtggaaacttcttagaaacataaattcttagttcaatcccagacctgctgattcagaaacttagggcattgtgctcagtactctgtattttaataaccctcactgccgagtgattctgatgcacactgaagtttgagaaaacactccctagtactagtcctactcccaagattgggtcataacattcaaccatgggaatattacaaattagaaaaatgttacatttatagcaagatttgtttatctaaataaacacttctccatcctggtccccctatcttcttttttttttttttttttttttttttgagatggagtcttgctctgtcacccaggctggagtgcagtggtgtgatcttggctcactgcaagctctgccttgcaggttcatgccattctcctgcctcagcctcctgagtagctgggactacaggcgtctgccaccatgcccggctaattttttgtatttttagtagagatggggtttcaccgtgttagccaggatggtcttgatctcctgacctcgtgatccacccacctcggcctcccaaagtgctgggattacaggcgtgagccaccgcgcccagccccgctatcttcttataggggtttaagtcagcagcaggcataagttttgttaagctccattcgatagataaaaacactaaggttgaaaaaaaaacccactttctcaaatgataagactaaaacaggcagtgtcaaagaagggatcgggcccaagactctttccacagtaacacaaagtcattcagaagacagtcaaataaaataagcaccagagaattcaccgtttaggggccagaaatgtgaatgcatctttcccagcactacaatgcttgctgataacggtaaataacctctcaggaggcttcctgagggtttgggtttctaaggatgcgagtcagtccttcataataattaagagcaatggcccacacaacttacagcgtcgttttttttttttaaaaaaggcacaatacccaattcatgccaccccaaaatggcatttttttaaaaacctgcttcacatttgtagaggtgaagaacctccacctctaagaaaccttgctttcagatatagaggtcccagcctaaacaccgaggtttgggtggatacggcccggaaacttctggaaaatgaggacaaagctggactgctgaaggtcttgtctgtgtttgggtggctgtctggcgcccccttgtgttcagtgcctggacccaaaagagccggaaggcaacaatgatgcagtgagggcaaatggctacagcaattcacaaatggcactctggccagtgaggaccagaggaatgggcttaggactgggcaaaggcccctctgcccaccatctgggctctcctgaaggccctccaagcactcttccagccctagtggagaagcagtcactaggaagacttgcctggcaggcataggtggaagctgtgcccaagctcacccgttgtctccaccaggaagatgggtcattgcatccttcttgctgggtgtttggccagagggcttttcctcctgacttactgccaagggcagaggcttagagcacccccacctccttttttttttttttttttttgacggaattttgctcttgttgcccaggctggagtgcaatgatgcgatctgggatcatcacaacctccacctcccaggttcaagcaattctcctgcctcagcctcccgagtagctgggattacaggcatgtgccaccacgcccaactagtttttttttttttttttttttttgtacttttagtaaagatggggtttcaccatgttggtcaggctggtctcgaactcctgacctcaggtgatccgcccgactcagcctcccaaagtgctgggattacagatgtcagccactgcacctggcccccaccccctttattaaagggaaattgagtgttctgctgaagacagcttgggcccctgaggagacattgcaaggcagttctgaatgtgctaagtcagtgggtgataatgggcactgtgtgcccagcaaaggcacttcccaccctcggccataaacagtctttaactggttcacacagaaggctggggttggctcttccttctcacctgcctgctccctgactcccacactgcagggctctaccttcccagtcatatcaccaaatcctgcccttggtgtgaaaaagaccatggcatgttcagcacaaaacagcagagccaatgacaagcatccaggcatagctctagccccagaacagggctcccctcaaggagcagccctgatctgagccttaaattctggatggatctcagctcctcctcatataagctgagttagacaagtcatataaatcagagcactaaaactctctgagccccagtctcctcatgagaaaaatggaaatctcggccctgaaattaggccagtatggctctaggtactatagagttgaatatgttggaaaatctaacagacaagtatcctcttgcctctgagtctttgcacattctgttcccactgcctggaacagttttctcccctctctccctcacttggctagtacctgtttatcttcagtctcagcttagacctcctcaggaacccttctgtgtttccttgagccaagtcaagttcccctccagtggttcccataactctctgcatgtcaccagtcccaaaagtggtcacaaaatatgttaactggctgtttgctggtctaggacctcactgtaataaaccccatgagggaagaatagggatcatgtctgccttattcaccttggcatcatcagggacctgtgcagtgcgtggcacatagttggcactcaagacaaatggatttgactggatagatgggctcagaatgaaacacaggctggggccagagagcgcaggccaagtcaggaaagcagctaagggaacgtgtacacatatccatgacgtggatagattcccacagtggcctgtagcccctgtgtcagtcctggaacccagtgctatctatgcctgtgaggaccctgcaccaggtccctgctgctctggcctgttagagaaagagggaaccttgggggtcattcaggccagaagtccacagacagagctcaggccttctctgcccaagctctaccagagagtttctgcttttattcttttgtatttgtttttctcaatgaggtagtgttttaaaatctggttccatgaggagaaggagaaaggtgaaaatcacctgcgccgtcattttacaaaaggaaaagagactctcggaagagaaggggttttccccaaggtcaaacggctcagtattggcatgggaagaccccacattctcaactccttacacacttttcagagggagggaagaaaataggggattgtgatttggagtgaagggccgagtctgcctgaagagtccccaagcccaaggtgctcctgtgacaccatcgcatcgtgggggatgagcatcacataccatttgtgccagcatcttgggagtgagatctggggaaggggtgcagaggggcccacagggcctggccgtgggatttcatggtcacagtcaaacacacacacacacaccagcacctgcactcatagctaatccccacccaaactcctacctcaccctgacagctgtccctgggaatattgtctccttaggccatggagggctgaaccaactgggaggggcctttgtgaatggtagacccctgccggaagtggtccgccagcgcattgtagacctggcccaccagggtgtaaggccctgcgacatctctcgccagctccgcgtcagccatggctgcgtcagcaagatccttggcaggtaagcacgaaattcaccgcaggccgccttccccgcagggcttgacttctccagctgatctcagggcagctggagaatacccctcccagggaatggggatttgctcccaatgtccagctttggtcctgagacctgaacagttatggtggtccttctgggcctctacccagccactatttttctactgttttcttgcccttccttctttctttgtccatttatccttcttttactttctccctctcccttcttctcttttgctccatgtctcattagccataggcttctctcctgctaaggcaagagaatcttcccccaagttcctcctcctaccgagacctagggaaattgggccactagggaggggacacacagatgagctcccaaggtctaacccctaaaagagtgatatctgagtttgtgcttctcaaaccataattccccaagaccccagatcagtgcttcatagccctggtagcacattacagtcaccaggggaagcctgatttttaaatagcaatactgtttatgccccagggcagaccaattaaatcagaactttagggaaataggcgcaagttttggcatataactccccagcccatccgcccccagcaagtgactctaattctctgcagccagggttgagaaccactgacccaaagattcagaagagaccaggagcagcaaaggcctgcatctgagctgacgcagtcacagattccagtctgcaaggccacttccattaaaaatgcctctgtgccacagcttccagtcagctctgtgtacgtgtgcctgtccccctgctctgacccttaggtggatttaggaggagccctggttggacaaggcaaagggacctggactgttctttgaaccgtgaaaagccctggctcccctcctgaagtagttagggaaaggcatgatcctttgctgggctagggagaggggattcctgtgatgggttgtggtgtcccagaagagatgagtcctggatggaagtaacagatgaatggagttttaaagagctagattctttttcatgcagatgagagcagagagtttctacaacaagaagaggaggatatgctgacacaggccattgatctgccaaagcaactagttggaggatagagggaggggaagggtggaggccccagaagaggaggctcagcttaacaagttggacctggctggggatccaagcaaggtcaggattccagagtccatgaggagaagcttcaacttgaacctgctaaaacctgatagaaaaccagtgaccaggggggtgagggatatgcctcaggcttggacagggcagggagcaaaggtgaaccagcaagacagagcagagggtccagtgacctcggctagctttctaggtggccaaagaaaatagtcagtcattggctgggcatggtggctgatgcctgtaatcccagcactttgggaggccaaggtgggcggatcacttgaggtcaggggctcaagaccagccaggccaactgagtgaaacctgtctctactaaaaatacaaaaattagccgggtgtggtggcaggcgcttgtaatcccagctactcgggaggctgaggcaggagaatcgcttgaacctgggaggcagagtttgaagtgagccaagcttgtcccattgcattccagcctgggtgacagattgagaccctgtctcaaaaaacaaaaaaacaaaaacaaaaaaaaaaactcagtcgtgctttagccaaaagaagctggatagagcaaactgctgtgcccttgtcattcacacatcaggcacaccaagatttcctttcttagaaggggaatcttttgtgccccatacaatggctgttgcaggtgctaggacacaagagactggccagagggaaggaagagagagaagccaaggtgaggcctttagcagagggtgctggtttggcagtagcatgaacctacccaagtgagggaaacagatagttccatgcacatcaagcgcttgagaccagccttggaggcaatttcactctcatacccctacccagaagcctcagagaggagggaggctctggcttaatccctgtctaaagaccccacctgcttattgggtaattctttgggattctctattggagtaggtactacgagactggcagcatccggcctggagtgatagggggctccaagcccaaggtggccacccccaaggtggtggagaagattggggactacaaacgccagaaccctaccatgtttgcctgggagatccgagaccggctcctggctgagggcgtctgtgacaatgacactgtgcccagtgtcagctccattaataggtaagagagaaagcagcctctggtgtcaggctggggcccctgggctttggggaaatcaggaaagagacaagaaaggcctggcttgggtggagcagaggccgggaaggggcctgatgctgaacaatcaggcagggagcacacctggctccaggcagatatcatacctccctgcctcctcccttgccccatgctatggggcaccctccccctggcccccagccatagtgtgctatctacagtttccttcctcaaacaccacatctgctttcattcaataaaagaatcttcatgaattgatccttttataagccatcagacccctaacccagcccacattcaagcattcattcgtttagtccctcaatgattcactcactgcctcaatcaatcatttacttactcactcgcttgttcattaattcattcacacataattcattcattcattttgtgctaggccctgggacacacaaagcccatctttgtggagcttacagtctaatgagaacacagatattaatcaactacctacaaaaaatattgtaaaaatgcagctgtaagtcctgctaagaaaaggaacatgaagatatgcaaggtagcacaggattatttggtttatgaagttcatgaaagtcttcccctgagtaaaaaacaataagagaactaggtgaaaagagctcagacagttatgtaaaggccctgtggctaatatgatcaaaagaaaaccagtagataggccaggtgcagtggctcatgcctgtaatcccagcactttgggaggccaaggcaggtggatcacctgagatcaggcgttcgagaccaacctggccaacatggtgaaaccctatctcttctaaaaatgcaaaaattaactgggtgtggtggcgagtgcctgtaatcctagctacttgggagactgaagcaggaaaatcacttgaacatgggaggcagaggttgcagtgagctgagatcacgccactggactccagcctgggcgacaagagcgagactctatctcaaaaaaaaaagaaagaaagaaaagaaaaccagcagataaagagcaggggagcacaaggtaggctgaagttgaagatatcagcagaggtgacctttcagaggctgggggctgtgttataccttcttgcctttgnnnnnnnnnnnnnnnnnnnnnnnnnnnnnnnnnnnnnnnnnnnnnnnnnnnnnnnnnnnnnnnnnnnnnnnnnnnnnnnnnnnnnnnnnnnnnnnnnnnnnnnnnnnnnnnnnnnnnnnnnnnnnnnnnnnnnnnnnnnnnnnnnnnnnnnnnnnnnnnnnnnnnnnnnnnnnnnnnnnnnnnnnnnnnnnnnnnnnnnnnnnnnnnnnnnnnnnnnnnnnnnnnnnnnnnnnnnnnnnnnnnnnnnnnnnnnnnnnnnnnnnnnnnnnnnnnnnnnnnnnnnnnnnnnnnnnnnnnnnnnnnnnnnnnnnnnnnnnnnnnnnnnnnnnnnnnnnnnnnnnnnnnnnnnnnnnnnnnnnnnnnnnnnnnnnnnnnnnnnnnnnnnnnnnnnnnnnnnnnnnnnnnnnnnnnnnnnnnnnnnnnnnnnnnnnnnnnnnnnnnnnnnnnnnnnnnnnnnnnnnnnnnnnnnnnnnnnnnnnnnnnnnnnnnnnnnnnnnnnnnnnnnnnnnnnnnnnnnnnnnnnnnnnnnnnnnnnnnnnnnnnnnnnnnnnnnnnnnnnnnnnnnnnnnnnnnnnnnnnnnnnnnnnnnnnnnnnnnnnnnnnnnnnnnnnnnnnnnnnnnnnnnnnnnnnnnnnnnnnnnnnnnnnnnnnnnnnnnnnnnnnnnnnnnnnnnnnnnnnnnnnnnnnnnnnnnnnnnnnnnnnnnnnnnnnnnnnnnnnnnnnnnnnnnnnnnnnnnnnnnnnnnnnnnnnnnnnnnnnnnnnnnnnnnnnnnnnnnnnnnnnnnnnnnnnnnnnnnnnnnnnnnnnnnnnnnnnnnnnnnnnnnnnnnnnnnnnnnnnnnnnnnnnnnnnnnnnnnnnnnnnnnnnnnnnnnnnnnnnnnnnnnnnnnnnnnnnnnnnnnnnnnnnnnnnnnnnnnnnnnnnnnnnnnnnnnnnnnnnnnnnnnnnnnnnnnnnnnnnnnnnnnnnnnnnnnnnnnnnnnnnnnnnnnnnnnnnnnnnnnnnnnnnnnnnnnnnnnnnnnnnnnnnnnnnnnnnnnnnnnnnnnnnnnnnnnnnnnnnnnnnnnnnnnnnnnnnnnnnnnnnnnnnnnnnnnnnnnnnnnnnnngtcccctaaagctttcttccttcccggggggtacatgtgatcaggatagctgacgactaagcattgactcatagattcagcagcagcggaccccgaaagcaccttcacacggatgccttaatgcaggaccagctcgagccgctcgagtgcccatttgagcggcagcactacccggaggcctatgcctcccccagccacaccaaaggcgagcaggtgagaagctgggccctgggaggtgaacagggtgggcaagggccagagaaggtctattctccaaatgagcctgtgctccatcaaagcagctggaagttgcatcaatgggctcagggcacctgccttatgcaactccaagcctgacacatgctttattttaccagatgccctggcatcttcctctctttctaaccctcctggcttccttcgcccaaaacctttgagcctggccctttcagggatggcagcacaacctgatgatgctatcccttgccatcagcgtctttcccagattgcaacatcacgttccacaactctgaagcagtagcacaaagccttcacatcatgaccgcagccactatttcctagccccacctttggccacgcatcctgcacaccccacgctcttgcattactcatggctccaagcacaccaccctcgctcacacctctctgcccttgcacaccgtgtgccctccacacagaatgcctttcctcccacttctctgcatggaaaaataccactagccttcatgactcagctcaaacatcaccctctccgtcagtcctcccctgcccctccgacatgaatcatctctcctgcctcttgcccttctgcatgtcccacatgctgctctcagtagcttctcacagtgtcacttaataatctagcagacaggcaggtacaaagacacgcggactccttaaggacagggaagcctcatgaaacattaaacatcgtttttattcccagcacctaccattgtgccccccttataatagacagtaatggtatagtgaatgaatgaacaaatgaatgagttgagaaatccagaataatacatcacaagctacagcgaatttttcttgctagtgctcaggacaggtgaaatgaatcataacaggttggtgtctgtgaaaagctgacagagatgtgagaggtcccaccccgaggccaacaaagactctgcagctctggcagaaccactaagctctcagctcctagtcatcacatctttttcccttaaccctgcccaagtcaaccagatgaggagtgtcttcagggtgggtctgttgcccctctttgcccatgccgtcatttgctgtaggagtgaggcaagcccatatgcctttaagaactgagtaggacaatggagatgatgccaataatcagcccaaccacttccagtgaccgtctgggctgctggtcccatgccagcactcgcagctgggcaggcaatttgcatcagcaattttatcagcgttgactgtggcaaccacgagcgtgcagagaaagctgaccatcagcagcatggggagagggcctgggtgctcacgcaccagtcagcacacagctccaggaaggaaaggggttgcagtggggggcctgcaggaagctcactctgtgagagtaagcctacaaaactcagtgcgcaggcaccagccactcagtgaaagtaaagaaaccctgctgatgagactctggacacccgctgagtcccagagccatttcctggctccatccctaagccccccaaaggaccctgcttgactacagagcacccccatgccatgctggcatatgaacatggggaatcctggaatgagagagtctttgagctttcggggacctccatgaccaccttgtccagtttctccatttgtgtggagataatccaagcaagacaaggagggcttgggcaatcagaaggttttggagctcaggcctgccaaccctcatttcattcagactggtccactgtcacctgtttcagatatggtgcttctacgtaaacacttatttgaagactgaaaaaaaaagcatttgaaaaccattaaacttctccaaccactcatctttcagatgaggagactgaggtccagcagtgtccataaattattcattacctcctcagtcaatcattattcacccagtcattcacctggagggtggtgaaggcagggagaaccagccagtgcaagggcccttcatgtcctgcctggcctttgcttttcctacctctggtaactgactgtgctgccaaagtaacactccgtgctctctcacctgggcataggaatgccctctggcttggggagccaagaaagaagcacaagtattcatacctgaccttaggacaggttgtaacacagctatcttttctgcaaaatcaacaagtgggggaccaggcatggtggctcacacctgtagtcccagcactttgggaggccaaggtggacgggtcacctgaggtcaggagtttgagaccagcctggccaacatggcaaaatcccatctctactaaaaatataaaaattagccaggcctggtggcgtgcacctgtaatcctagctactcgagaggctgagacaggagaatcgcttgaacctggggggcggaggttgcagtgacccgagattgtgccactgcactccagcctgggtgacagagcgaggctccatctgatacaaaaaaaaagccattgcgaagtgttcatcagagacatcatnnnnnnnnnnnnnnnnnnnnnnnnnnnnnnnnnnnnnnnnnnnnnnnnnnnnnnnnnnnnnnnnnnnnnnnnnnnnnnnnnnnnnnnnnnnnnnnnnnnnnnnnnnnnnnnnnnnnnnnnnnnnnnnnnnnnnnnnnnnnnnnnnnnnnnnnnnnnnnnnnnnnnnnnnnnnnnnnnnnnnnnnnnnnnnnnnnnnnnnnnnnnnnnnnnnnnnnnnnnnnnnnnnnnnnnnnnnnnnnnnnnnnnnnnnnnnnnnnnnnnnnnnnnnnnnnnnnnnnnnnnnnnnnnnnnnnnnnnnnnnnnnnnnnnnnnnnnnnnnnnnnnnnnnnnnnnnnnnnnnnnnnnnnnnnnnnnnnnnnnnnnnnnnnnnnnnnnnnnnnnnnnnnnnnnnnnnnnnnnnnnnnnnnnnnnnnnnnnnnnnnnnnnnnnnnnnnnnnnnnnnnnnnnnnnnnnnnnnnnnnnnnnnnnnnnnnnnnnnnnnnnnnnnnnnnnnnnnnnnnnnnnnnnnnnnnnnnnnnnnnnnnnnnnnnnnnnnnnnnnnnnnnnnnnnnnnnnnnnnnnnnnnnnnnnnnnnnnnnnnnnnnnnnnnnntccatgtggtggaattcggcaagtatactaaagctacttggcgggtcattgcagaaccagggctcagagttgctgaagttctgaagcattgtgctgctctgccccgattcaagttcaattccagctaaaaagcccaataatcactggtgaagtgttcaggtcatgtgaatacgaaatcaccaaaagatttgactatataggttttctttttcctttttttctaagttacttggattttgaaatagctataggattctgagtagatattttgctgtcaaaacaacacatccataaagcattttaaacttctcttatactctctagaagttaggtattttgttcaatttcaataagacacaccctggccaggtgcaatggctcacgcctgtaatcccaacactttgggaggtcaagccaggcagatcatgaggtcaggagtttaagactagcctggccaacatggtgaaactcctgtctctactaaagatacaaaaaattagcctggcatggtagcacgcacctgtaatccctgctactcgggaggctgaggcaggggaatcacttgaacccaggaagcagaggttgcagtaagcgaagatcgcaccattgcactccagcttgggcaacaagagcaaaactccgtctacaaaaaaaaaaaaaaaaaaaggccctaagcaactccaccctgcctctaagtgggcccccttggaaggcatggaaccagagcaccatttagtcaataattgctgctatgtgctaatggtgccctggtggcctccagaattgactgcagcttccaaaagtgcccagcatgcaaccggaaagtgctgtgggtctttgcagaacccagctcgatggaaatcactgaaaacaattgcctttagtggcactgttatgtaaccactgagcattccctgcattcagctttgcacatctcacgtagcaggtatgtgacgagtgtgaaggtatgtggggaatgggtgtgttcttttttctgcgctatctgcttccccggtggaaggaggccatggtgaggatgaggtacacttgcctttagttaaacaagttcttttcggaaggagtacctaaggtcatagctgtgctcctgggaaggggaggccaggaggcatctaaaatgaggtcttactgatgaagacccccaggtacttgacaaagagtgtttccaacaaaaacaactctcaataccatttttaaactgaacttgcacacttctatttgtttggatgtggagagagaaaagaagaaatccacgtggtgggtaaagcacctgggtccacagccgaaatcccgggtttagtctgtttcattatacaaaattgggccatttacctgagttccaggctccacatataaaacacagacataatattactcacccatgtcactgggctgctgggggactctactaggacaacagaggcaaagctctgatataagctctttgcaaatgtaagaagtggtccttatgtcacccagtttagggcagtggttgagagcagacacattctgatccctcgaatctgaatcctatctttggcccatctggaagtgggacaagtttcttaaacctttgtgcctgggtttcctatctggggaagaataaattaacagatgcaaggaccctgaacagtccggtcggagactgctccagtccttggcaccgtcctgcattctgtgggtcccaacagtgtggtgacaccaggaagccgaccagccatccaaccagggtgtggtcctctggctgagactctctatcccacgtctgggcacccatgccaccagccggccttgaattccagggatgcgggaggacaatgagcatgaacgaaacgtgctgagtggagttgagaacgtaaaggaagaaggggacgatgagggcctctcctggggagattagggctgccaagtcctaagacacaggctcagggtctgcaggaaggtcggcttgtcggatcatctctgtgcgctgacttctctttgctccccagggcctctacccactgcccttgctcaacagcaccctggacgacgggaaggccaccctgaccccttccaacacgccactggggcgcaacctctcgactcaccagacctaccccgtggtggcaggtataacgcccggagcctccctggcaggtggagggcgggggactgaagagcttggctggctgtcaggcgggaggtgtgtggggccctggcctggagaggagaggtgggctgtgctggctgggcctcaaggcgggtcaggggggtcgcgcctccagtcccaggccgctcctgggtctccacgctccctcccgtgggagaggcgggcacacacactccttcccgctctctccattttcactgcagaagcacagcagggaggtctagcttctctctcccctccttgccacacctcgtgggccctggctccccggcccagactctgagagcagctgggcctgcctgccccgcgccccgcccgcgccctccacatctcatggcttggtttgtgcatgttcccgccccgtcatctcacacccctctctccttgttgtcttccctccctccggcagatcctcattcacccttcgccataaagcaggaaacccccgaggtgtccagttctagctccaccccttcctctttatctagctccgcctttttggatctgcagcaagtcggctccggggtcccagccggtgcctcggtcccgcccttcaatgcctttccccatgctgcctccgtgtacgggcagttcacgggccaggccctcctctcaggtacgacagggaagtcccggggccgtgcagctattgcggtgggcgggaggggggtcctcagggcagactgccagccccctctctggcctcaatctcatccaccaccgccctgttccctaattcctccggcaacttttggaggcgccaacatgctcggaaggggcggatgctgcaggggtgccaggaagtgggatacaccaccccaagactccatggaaaagcaggaaccctaaggccgggagccgggtgctgtaacatagcaacttggccttggtaaatgcataaatacatagaaggaaaaatgaacattttggagggaaaaaggaattggcttttggagccaatttctggatcaaatttctaaaaaggccaagggtcagtcccagttgtgtttccatgatgcagctatcttcattcctagcttaacagcatcaccgggaggacagtcagacatctgttaaacatgataaattcagtgattcaacaacttgagaggagtgggggacctcccatcaggaacctcaactgcctcaaaatatttaaagctggaagcaccgaccgggcgcggtggctcacgcctgtaattccagcagtttgggaggccgaggcaggtggatcacaaggtcaagagttcaagaccagcctggccaagatgatgaaaccccatctctactaaaatacaaaaaattaggggggtgtggtggcagacacctgtaatcccagctactggggaggccgaggcaggagaattgcttgaacccaggaggcataggttgcagtgagctgaggtggcgccatggcactccagcctgggtgacagagcaagactccatctcaaaaaagaaaaaaacaaataaataaaaataagtaaatctggaagcacctgagggagcctctagagcaaacctcttatgctgatgaggaacctggcccagggaggagaaggtccctgccaaggtctctgggcaggagcaccatctgcagctgcttgaggcctgggcctgcactgcatgagtcagacctcaagggaagctgggtcctcccggcagaaggaccttcgctcatccagccagggcctgaggaatggctgagagtcaagcgcttggcttgggttggagagggcctgagatgcagtgaaagtgggaagcagagacccatatggtcttcagatacctcaagggcttccacagggataggactattttagatgtgggcccagtgggggcccaggaccaaggaaggaagccagctagctctcagttcagcattggaggaatctctttaatatcggcactgtctccaaggagtgtgggtatttagtgacagagtcccacaccctcctaccctgacgaccttgaaatgctggagcagagaccagtgcgtgggtggagtgtgggagacctgtcacagaggcagcccagagtcagacagtccatctggaccagtggtttcaaatttgggcctctcaatgctctcttgaaatgaagccttttacagaagacatgtatgctcaccagacttttagaaggggtccctgcccctagaaaggccttggacttcgaaaccagaggattaagacttctacaagcccagagtaaccacagggtcatgtgataaaagtccctggaccctttttttttttttttttttgagatggaatctcactctgttgcccaggttggagtgcagtggcgcgatctcagctcactgcaacctccgcctcctgggttcaagtgattctcctgcctcagcctcccgagtagctagaactacaaatgggcgccactacacccagctaatttttgtattttcagtagagatggggtttcaccatgttagccagaatggtctcgatctcctgaccttggtccgcccaccttggcctcccaaagtgctggggttacaggtgtgagccaccgcacccggcccacggacccttttttataactggctctacattttctttctggctggcacccagggtttgttttttttcccctccgtacatccctgcacctaatgtgagaagttttcttagaagagagggacatctagtgtgtgggcagagagatgctgtttaagggtctaaagcgaggaataaaatgttgacttggagttcaagaactcaagagggtgaaggccacagagatgggtcgtttgttttgaccaaagtgatgaaaagagcaaaacctgtgagctgagtaaaattatgtcagccagagaaaatgggatgcggggtagggaggggaatgagaggagagtggagaggaagggaggggaagggaagggaggggaggggagggggtgaggagaagaggttcatgtcagtcacagggagttacgcaagcctgcatgtcttctgagaatggcaggctagggctgggggcggtcatggggcaggcaaggggtgagggtgtggtggtgcccatgatgatggggagcaggtgctgtggaagccgcggagaagcttggcaagaccagctgaaggagagggaaggatgtagggcagctggaaatggatagatgtatcagagtgcagacataggctgtggtgtaaagtgtaactggaacagcccagggcaaactccctgctcccaaagcccctacactttgtcccctccctgtcatcctgttagcatcccctgtcaacatgcagtcaatcagaggtgacgcctccaactactgtcagctgttaatttagtggacatgcccactctccaggccaactgcaggactgagaggtcacccaatccatgggacaaaacagctggcagcagacaccaggtagtcatgtagggatcaggcagccaaatatgcagcaccggcgtatctttcaggctggtggcccccaatgcaggcccagatgatgctgaagtgcaggtgtgagcactttgaaggttgctggctggtcacagggccccctagcccaagggttgacaattcagcacagaggcagaggctctgaaaagagtgaggagtgctaggcttggaggatctggggtccaggcaaatggccaagagtaggaagcaagtcagaaagcagctcaggcacaagggaggggatggctggtgtccatgctgagctcggggtgttggcctggagctccttacagactgtccacctgaggcctctggtcaagactggatctcaatacctaacacgtggctgagccatggtgagagagctgggaggacatgacggggggcggtggggaaggttaggaagggaatggttccaggagcgcaggaggctgcagaccttcccaagaagaggtgaatttgaaagaaagagaaggaacctgggcccgatggctcacacctgtaatcccagcactttgggaggccaaggtgggtggatcacctgaggtcgggagttcgagaccagcctgaccaaaatggagaaaccccatctctactaaaaatacaaaattagccaggcgtggtggcacatgcctgtaatcccagctactcgggaggctgaggcaggagaattgcttaaacccaggaggcggaggttgccgtgagccgagatcgtgccattgcactccagcctgggcaacaagagcaaaactgcgtctcaaaaaagaaaaaaataataaagaaaagaaagagaaggaagttgaggccacattattcctaggtaatgctgcagaccaggagagaggagagaggacacagtgagttttcattccataatcagctcagctttaacccgcgtgaatcttccacatgcctctgagtgactcccaaggaccctcgttgccgcctcctgcaactccttcacctacttcatagcgtttttctctgggtcacttatttccgcctggtggctctgatagtgtgatttccaaggtgactatccttctgagtctcagctcatccccagtcagccaagaaagaagaaacagcaaggtttggggaatagcaagagtgcccctaacattgctgccagttccctttggaagccccagtctggagtcccaacacactggccaagacagcaatgtcgaggccgtcctggtcccagctgctctgggactgactccagctcagctcaaaggaaagctgtgagttaggttttatcatcaaagagtccattcccctcctccatccttttgtacaaaattatatttagttctgccaaagagatttctgagttgccataaattctccttgctatcagaacgagataaggaattgaaaaggggttacatggagggcagacttcaaagggggaaaataaaatagtctgaaatcacctctaccctctgaattcctccaggcaatagctttatgattctggcctctaccaatatttagaatatttaccaatatttcaaggtgtggggggagctagagttttcctagagaaccccactccagggccagtcaacatgggcctatgctttctgtcaacttcttaaaataggaccacgttggaaagaaatttgggtgtagaggagatggaattcatagcgaggatagttttatgatgaagagtcttaaaaacagagaagtagataagagggcatggttaggccgtgatggagtttccaccccacagcttctgtggttttgtttctaagaaggcttgcaagcttcttggctttttggaagaaactatgcatttaagcaattggagcaaagagttttgtagggctgttgggagagtttattgtgccatagtctgggtgagagccatgctgaagaaagtcttagcagtctttccaggaagaccagctttcatggcaggaagcctcaggcgtctgttctgatgtccgattcagaagcctctaccccattgggacgacattaggtgactgaggggagatgaagattaaaaatcttagagtacaggggagtgagactgatgaattccatttataagatcaatgtaggggctagttctcatgcggtggagccccgtgggagcacctctggaccatattaagctgtgttgtaaggggagtatatgccctggaactctgcctgctactctgccaggctcgagaggcagcaggttcaggtaacagaacgagaaggaacaggatgaaggcagggggaaggggagtgcggggccacaggctgccaggccagaagcagccctgcagggcacgaggctagcaccagcaaacaggtgacctgagagtcaagaccacctcccactgctccccaccccgatcatggcagacacaggctgcctcagaatccttctcaacactgggtgccaggaagtccctaccagccaatcaggtagtcaggtgaatccagtttacaagctgaaatctaaactagttccttatgtgacaggcaggaagacgtggttcagagaattaagtggctgtctttcatccagggtccagcctggatctggagttccctttctgtctctctcatggaggaagaggtagggagggaagagaaaagaaggaagcaggcctgaatccgccaccaccctcttccatcactccctccctcaccacctgtccctgttctgtgctcctcctgctctcacagacttcctgtcactccttccctcttgcctagccggtgcttcatctgagggccaagggggctgagtttgagggtcgattgtgttgtattcttcttcaaagaaagctcagattttatctcagtatagcttctgcatatttctccctctgcgtctaaatatcttaaaattctcttttcccttcctgtgtttccagcccttcatttgttcccttgatgaccttgtgtcacgtgaactgaacacacctgtagaattctagtgggtttcaccccatttggtccggtgccaagcacagctggacactgcaggaaaagtcaaacaaattagaaggtggtgttcaggtttaccaaaacattcgcacggttttaaacaatgaacactgatggctctttattctgtaggagttcactggcatataaccatttctagaatgtgtccattgtgctaatcaatgtccccctgtagcatgaaaccatggctctgaattatacagataacctcatagaaattgtaataaggtgcctacagttatattttttttcccattttgcatatgaagaaactgacacttggggcacatactaggcttatctaagggcactcagaaaactagccacagaagcagtataaggactccaggccctctgattcccaggccctgccctctagaggaagggaagaagttgtgtgtgcctggtttttgttcattgaccccttgggcttggctccaaatgcctatcccagcctatgtcccttcttgatttagtgcctggccttgctaatttagcatcctggctttctgctatatacccaagtgcttagaaaagtgtctagaacatagtatttactcaataagtatttagtgaatgaacactgtctttggggaatctccagaaagagagataaggaggaggtagtcactgcagtattggcaacttacaggatttcatggggccttccttcccttctgtcatgaccaggtaccccttgaaggggctgaggtatgaaggacctgggggggactgatgggtggatagttggacaagcagtgccatagaggagatgaatttggtaagttggttaacagggctcacaggtggcccacacaggtcctgggaggaaaaagcagcccccaaaatggaagaggcagaaggcatttgggtaaaacagtcatagtccaacacaatggttcttagccagcagcgattttgcccctactacctcctgctgaggacatatggcaatgtctggaggcatttttgttgtcacactgggtgaaaactgctgctggtgtctactggatggaggccagaaatgctgctaaacatcctgcaatgcacaggacagcctcctgcagcaaagaattgtgcagcctaacatgccaatgttgctgagactgagaaactctgnnnnnnnnnnnnnnnnnnnnnnnnnnnnnnnnnnnnnnnnnnnnnnnnnnnnnnnnnnnnnnnnnnnnnnnnnnnnnnnnnnnnnnnnnnnnnnnnnnnnnnnnnnnnnnnnnnnnnnnnnnnnnnnnnnnnnnnnnnnnnnnnnnnnnnnnnnnnnnnnnnnnnnnnnnnnnnnnnnnnnnnnnnnnnnnnnnnnnnnnnnnnnnnnnnnnnnnnnnnnnnnnnnnnnnnnnnnnnnnnnnnnnnnnnnnnnnnnnnnnnnnnnnnnnnnnnnnnnnnnnnnnnnnnnnnnnnnnnnnnnnnnnnnnnnnnnnnnnnnnnnnnnnnnnnnnnnnnnnnnnaggacacaggagcgatagaagaggggcaggggcaagggatcatgtttatgttcattgttatatgcagtagatggggagatgctcaccaggtcaggtggggcctccaaaatgggaaagtgatttctcgatgtagaggagaagcagagccgggaaatgaggtctttacagagctgatttggtatcaccaaggtgggggtatgacccacaagctatagataaacagagagattggtgtctgttttgctaaaaatggttcttttcaaaatagaatggacagatatgtggcttgtggtcatataaaagctaaatatctccgccacatctccttctaggttggggttagccaatcggtttcctgtacctggcaactctgatagattgcatccacttggaaggccccctctactcagggggaaatgatatagtggttgattagcaatgtctgtcacaggccccccaaaaaatagtgatgagttagtggcccacatacatgccatcccttcatagggtcttactcttggtatcctcagagccgggaatgaaagggatgagctctgagtcaagtggcctcaaatgtatttatggaggccagctatacccactgctctgctggctgctgttgggggtaacaaagaacagaagacataacctcagcctccaataccaggacattcttgtggattaataagataacaatcacgtaaacaaaaccactggagaacagggaacagtgtgagactgcagtaacaagtgctccctgcatggtggagcctctgtcctgcagaaaaccagacagaggtgaaaagaacttgggctcagatgaggagtgggggcaggaggaagtgggtttggagaatggctgtagagagggtgggaatggcatggaggaagacagcctcaggagagtgagatgatacatatgggagcccccatggtccaactgacgactctttgctgtatttttccagggcgagagatggtggggcccacgctgcccggatacccaccccacatccccaccagcggacagggcagctatgcctcctctgccatcgcaggcatggtggcaggtaaggagagggccagcaggaaggggagcactgcaaagaggaagtattggagcaaggtgggacacaaggggcaagaggcatactgtgccctattcatagacttcctaaagggcattgaaggatggaccaaagagggcatctccttgtaaatgcctggagacgatgtcccagtgcagtcctgactccctatttaacttgccccagctcggcctccttcttcccaggcctgctatattaccctccatgatgaaagggaagggctgagacaggtctgtgttcaaatccaagctccaccacttcttccagtgaatcagtgagcataaatggagagcactctaagggccccaaaacactgtgagtggaagatgaaccctaccctcaagcagtgctggtctcccagtgatttaactctgatgaatcccagtttgcccgttctgtaaaatctgaatctgaagggtattgatgatgatgatgatgatgatgacgatgacgatgatgatgatgaaatatatgcttcacatcnnnnnnnnnnnnnnnnnnnnnnnnnnnnnnnnnnnnnnnnnnnnnnnnnnnnnnnnnnnnnnnnnnnnnnnnnnnnnnnnnnnnnnnnnnnnnnnnnnnnnnnnnnnnnnnnnnnnnnnnnnnnnnnnnnnnnnnnnnnnnnnnnnnnnnnnnnnnnnnnnnnnnnnnnnnnnnnnnnnnnnnnnnnnnnnnnnnnnnnnnnnnnnnnnnnnnnnnnnnnnnnnnnnnnnnnnnnnnnnnnnnnnnnnnnnnnnnnnnnnnnnnnnnnnnnnnnnnnnnnnnnnnnnnnnnnnnnnnnnnnnnnnnnnnnnnnnnnnnnnnnnnnnnnnnnnnnnnnnnnnnnnnnnnnnnnnnnnnnnnnnnnnnnnnnnnnnnnnnnnnnnnnnnnnnnnnnnnnnnnnnnnnnnnnnnnnnnnnnnnnnnnnnnnnnnnnnnnnnnnnnnnnnnnnnnnnnnnnnnnnnnnnnnnnnnnnnnnnnnnnnnnnnnnnnnnnnnnnnnnnnnnnnnnnnnnnnnnnnnnnnnnnnnnnnnnnnnnnnnnnnnnnnnnnnnnnnnnnnnnnnnnnnnnnnnnnnnnnnnnnnnnnnnnnnnnnnnnnnnnnnnnnnnnnnnnnnnnnnnnnnnnnnnnnnnnnnnnnnnnnnnnnnnnnnnnnnnnnnnnnnnnnnnnnnnnnnnnnnnnnnnnnnnnnnnnnnnnnnnnnnnnnnnnnnnnnnnnnnnnnnnnnnnnnnnnnnnnnnnnnnnnnnnnnnnnnnnnnnnnnnnnnnnnnnnnnnnnnnnnnnnnnnnnnnnnnnnnnnnnnnnnnnnnnnnnnnnnnnnnnnnnnnnnnnnnnnnnnnnnnnnnnnnnnnnnnnnnnnnnnnnnnnnnnnnnnnnnnnnnnnnnnnnnnnnnnnnnnnnnnnncatcgaacacctactacattcatgttaggtacatgataaatgcttaaagcaaggcatgccaaagacattcatccatcaattgtgaaaggaaggaagtgatcacttattatgtacttttgcatgtctagccattcaaatatgtataactttatttctaattttaccctgaccataagactaagaggctaatactatcccagttttatggataaggaaactgaagcaaaagcaaagtggtgtgctcagggtcataatcatactaagtggctgagttatgcaaacacggatttttcaatttcaagtctaaggctctttcctctacaccatactgcctcctaccgtaccagaaataaagacacaggctgcaagagaggagcacaggaaaagggctaggacagatttcccttgtctattcaccttctgtttctgttttattttattttattttattttattttatattttattttattttattttttattttattttattttttattttattttattttattttattttattttattttttgttctgactccattaacagtcaatgattctcaaccagttctagagcagaaccagcagctccagacacatggatccatccagtcatctatctttccactcattcatcttcccgtacatttttccacgcatccatgcattttcccatctatccttccatctttcatcacccatcccatcatcctccacctttccaccaatccttccatctttccatccatctttctttctttttttttttttttggagacggagtcttgctctgttgcccaggctggagtgtagtggtgtggtcttagctcactgcaacctctgcctcccgggttcaagtgattctcctgcctcagcctccccactagctgtcactacagggacccaccaccacacctggctaatttttatatttttggtagagacggagtttcaccatgttggccaggctggtctcgaactcctggcctcaggcaatctgcccgccttggccccccgaagtgttgggatacaggtgtgagtcaccgtgcccggtccctccatccatcttttaattcatctgtctttccagttatctatcatccatctttccatccatcaatccttttatttttccatccatattcattcatccattcatcttttcatagaactatcctttaatctgtctttccatccatcctttcttcatccattcttccacccatccctcctctcctagatccatcttttcatccccttttcaatctattcctccattcatctatccatctttctatatatacatccttttatctgtccatctttccatccatcttgtcacccgtccgtcctttcatcatcaatccttccaccattcacactttcattcatccttccatccttccatccatttaccactttttcacttaacaaatactggttgaaggtctactgtataggatgctggggatacagcagtgaataagtcagattcctttattcctggagcttataacctaatggtgaagacaaatggacaataaataagtcaatgaatgaacataataatttattgtctgtgaagacaataaaatgggatgatgtaataaagagccacagggagaggagataactactttagattgggctgtcaggggaggcctctctgagaaggtgttcaaagtgaccattcaagtgataaactggggcagaccatccctggaccaaagaacagcaagggcaaagggcctaaggcaggaactagtttagcatggtagcacaaaattgtagtggctgggttgagttttaaaaggctactctgacttctaggaaaatgaattgtacatagtcaagagagaaagcacaaagaccagttaggggacagttgcagtagttcttgcaagagatgacagtggcttgagttagggaattagcagtgaaggagggaaaaagagaccctgaaaatatattttggttgcaaagccagcaaaccttgctggtagattggctgttgggatgagaaaatagaggaaacaaggatcatttgtaggtttggggcatggatgatggtggcaagtatatatatgggagaccaggaggggaagtgatgtagtagatggcaggtggaaatcaagagtnnnnnnnnnnaaggagggacttgccctacacagctgggctcccagtgagttccatgaaaatcagttttagaaaatgcaatactatttaaatgaatcacttggttcctaggaatggcactgtgcaaatgaattcttaaggaaatttttttgtggaaaaattctatgtccgtctcttaccactgcttgcaatctcccagttgattgaatggggactcctgcaattaaagtgaataaactttcatcgaacacctactacattcatgttaggtacatgataaatgcttaaagcaaggcatgccaaagacattcatccatcaattgtgaaaggaaggaagtgatcacttattatgtacttttgcatgtctagccattcaaatatgtataactttatttctaattttaccctgaccataagactaagaggctaatactatcccagttttatggataaggaaactgaagcaaaagcaaagtggtgtgctcagggtcataatcatactaagtggctgagttatgcaaacacggatttttcaatttcaagtctaaggctctttcctctacaccatactgcctcctaccgtaccagaaataaagacacaggctgcaagagaggagcacaggaaaagggctaggacagatttcccttgtctattcaccttctgtttctgttttattttattttattttattttattttatattttattttattttattttttattttattttattttttattttattttattttattttattttattttattttattttttgttctgactccattaacagtcaatgattctcaaccagttctagagcagaaccagcagctccagacacatggatccatccagtcatctatctttccactcattcatcttcccgtacatttttccacgcatccatgcattttcccatctatccttccatctttcatcacccatcccatcatcctccacctttccaccaatccttccatctttccatccatctttctttctttttttttttttttggagacggagtcttgctctgttgcccaggctggagtgtagtggtgtggtcttagctcactgcaacctctgcnnnnnnnnnnnnnnnnnnnnnnnnnnnnnnnnnnnnnnnnnnnnnnnnnnnnnnnnnnnnnnnnnnnnnnnnnnnnnnnnnnnnnnnnnnnnnnnnnnnnnnnnnnnnnnnnnnnnnnnnnnnnnnnnnnnnnnnnnnnnnnnnnnnnnnnnnnnnnnnnnnnnnnnnnnnnnnnnnnnnnnnnnnnnnnnnnnnnnnnnnnnnnnnnnnnnnnnnnnnnnnnnnnnnnnnnnnnnnnnnnnnnnnnnnnnnnnnnnnnnnnnnnnnnnnnnnnnnnnnnnnnnnnnnnnnnnnnnnnnnnnnnnnnnnnnnnnnnnnnnnnnnnnnnnnnnnnnnnnnnnnnnnnnnnnnnnnnnnnnnnnnnnnnnnnnnnnnnnnnnnnnnnnnnnnnnnnnnnnnnnnnnnnnnnnnnnnnnnnnnnnnnnnnnnnnnnnnnnnnnnnnnnnnnnnnnnnnnnnnnnnnnnnnnnnnnnnnnnnnnnnnnnnnnnnnnnnnnnnnnnnnnnnnnnnnnnnnnnnnnnnnnnnnnnnnnnnnnnnnnnnnnnnnnnnnnnnnnnnnnnnnnnnnnnnnnnnnnnnnnnnnnnnnnnnnnnnnnnnnnnnnnnnnnnnnnnnnnnnnnnnnnnnnnnnnnnnnnnnnnnnnnnnnnnnnnnnnnnnnnnnnnnnnnnnnnnnnnnnnnnnnnnnnnnnnnnnnnnnnnnnnnnnnnnnnnnnnnnnnnnnnnnnnnnnnnnnnnnnnnnnnnnnnnnnnnnnnnnnnnnnnnnnnnnnnnnnnnnnnnnnnnnnnnnnnnnnnnnnnnnnnnnnnnnnnnnnnnnnnnnnnnnnnnnnnnnnnnnnnnnnnnnnnnnnnnnnnnnnnnnnnnnnnnnnnnnnnnnnnnnnnnnnnnnnnnnnnnnnnnnnnnnnnnnnnnnnnnnnnnnnnnnnnnnnnnnnnnnnnnnnnnnnnnnnnnnnnnnnnnnnnnnnnnnnnnnnnnnnnnnnnnnnnnnnnnnnnnnnnnnnnnnnnnnnnnnnnnnnnnnnnnnnnnnnnnnnnnnnnnnnnnnnntgagctttctactaaatgtccagttttaataagtcagcaggtacatcatgtgtgtctgaagccaggaaagaatcctgactagagtataaatttcagccattgcacaaagctgtcatttaatgacaagactactagaaaccaagcctggggttcttcaacaatttagagctctaacagagaaggaacagcaagaagaatgagtaggaaagacaactgagttacaaagcaaacagaagactgggcatcacaaacccaaaggcatggagacagggatgagctaaaaggtcaagggaattgagtatatagaagtgaccattggtatgatggagttagagactgtggggacttgaggggatcagagttggcctgataggaagagataagaaggtgaaggcagagaccatggggcagagaaaggcactggtagctagagaggaatgtggggataggaagaggattttttaaagacagaagatagcagaatatgtttgcagggtgaagggagagactgatgaaacagaaaacgggatcattggagcggccaaatccttggaaaggtgagtagggtgggatgcagagcaaagaggcagggttggcctttcattggggcagagacgtttcatctgctgtgactgcaagcaggtaggcacatctgatgacgggaagatgccacacccaggtgtgtaccacctaccgagctccatcccctgccccaggttccatgtgactgaggtactcggtaaatggtagttaaatacataaataagtgggtgagtgagtgaatgcatgaatgagtgacaaaatgagagggtaaacacatcatgttttccacctctctcccttgtcctctagagctcactgtgtttgccattgggaagggtgtggtaaaaggtgagagggcccttgctgtgtggccagtagagaatcggctgaaacccgggagacctgagttaaacaggaggcagttggcactgggagatgcaagagagagtaccattgtggaaggacggggccagggttctagttccggctttcactgaacatgtggccttggccaaatgtctttacttccctatgtcacagctgtgttatctgttaaatagatgtttagagtagattatttcttagtttttcatctgttaaatagatgtttcgattagattatttcttagggttttttttctttgcttttttacttctttacccccttcctttttttacccatgttttttgcttgatttatgttagacttagtctctgcccctaaggaactttcttactgtgttcttagtccatcattgacttcctagacaaggaaaggatccagtagcctttctctgctttaggcttctcctcttcatctctcttcttcctgtataaatgcctacttgtctggcaataaagcagctcccactaaccccaacccaggccttaagactggttggatgactgatttaagcctccattgagctttattttcgcacctgtttaatgggaaaataataaaagcttacatttattgagcactccctatatatttgaagcatggtgctaagcatttaatacgtattttctcatttaattctcattaaaccaaatgagatagggataattatttggcccattttacagataaggaaaccaaggttcacctgtaagtcactcactcagagaggctaagtgacttgtccaaggttacataaccaggaaatgggaagtaaggatttgactctagacaggtcagctccagagtcagggagtttcgagcaacccctccaaagagtctggggaaggagactcagaaccacgtagctcccaatcgtaggtgagtttctgaaaggctgggtggacattcattgagtctcagggttggcaggaatctagctttgtaaatggaattatcgcataagtgaataaagggattatctgcaatttggaatcaagagccctaaggtcgagttctactctgacatttaacaacagtgtgatttgaggcaaactgcttaatcatgctgcactccagtttccttttctataaattggtagtatccatgagtacctcatggggtagtcttgagaataaaagatcataatgtatgggaaagtactttacaaactttaagctctttaccaagcaccagtagtagctgtggtgatcactttgactttgtttttgttatgtaagggaattcttaagtaatttcttcggtaaataattcctttggaaaagtcaagaatccattaacagaaggaggtgatctgatttactttgtgtaaatttatacgttgagtttgcttaaagtggcagactcaggatggaacaacaaactactccaagtcccaggacacagcttcctgagggtgtgtgccctctggggctctccctcctctcccatccttaaccctcacacctcccctcagccccccatgcacacaaacacacacactcatacctagggaggctaaaaggttcatatatatggatgtcctctttggcccctaaccccatacccctgctgtggggccctcccagaagaccccttctccagaaggtccaggcagcagaaggagcagttagtccctgggccctacagtcatagcacagtttcccagctccaccaaaccctccagctctgggagcttccgcagatcccagaggctcagtttcttcatctggaaaatgggggtagttataacatctaccttctgggcctcctgggagggctgtagtatgtcaagccagtgcctccagtacctacggaaaaggacactgccccaaattatccagaccgatgggttccaaaagggatgacagagggaccttctgagctctattgtccctgccgtggctccaactgtctcccccaccattcctgagcttgcccattgccagccctgcagaccttaccacaccccagccctgcattgatgcccttcacctcacaggcctctcccctgtgtgcctccaacaggaagtgaatactctggcaatgcctatggccacaccccctactcctcctacagcgaggcctggcgcttccccaactccagcttgctgagtaagtccctggggctgcccaggcctctgctgggcaggatggatggagtggtggggggcaagggtggttcaaaggttacctgaaagctgggagtcctcagattatacagagggcctgggagatggtgctgtttgtgatggaagaaggcagcaggagggcagtgtacctggttgtttggggaaagagggcagaagtccagaggcttccaggcattcgtttccctcctgcttctcaagcccatgtcttttaaatctttgttttgtgtaagattcagggctcaggccttgaaggggaggacaagggaggacttgagaaaagcctaagacaggacctcctgcctccacggcttacagtcccacagtgcagacactgacgcagggcacccgccagaatgtaactgccctccttcctgggagccagtttcaagaatgccatcctgttgcccccattaaccatctaagtggctcagaaatactcatgattcagcaccaaacgcttaaacagaaatcttttgttccaccacattccccatatttagcctgagatgaagacagtattcagggtcaaggtccagagagtgagcttcagcgagcttccaggcttctcttcacccctctcttgtcctggggtcctgaactgggaagagaagcttttcagcaaagcaaaactccaccaatggggggacttgagggatcccactagagcctccctgagtggtggccttgggggtatcagagcaaaccggagccagacagaagcagtgatccaaggatggccaaccccacaggcaccattgcaggctaggaaccatccattccccaagaccccctctcctcccattacctctttgtattccagaaataacttgaaaggtggcagacctgggccctgtttgccagatgagttcaactccaacccacctttccattcaatttagccagaaaagacgagggcagtgagacatgccagggttcaggcaccttcccactgagcctccccaggctgcccatcctgcaggtgtgcagagcctcaccttaagggccgtcaagcccagatcccctttgacccctcagcagtctaatctccctgggtcttaagaaagaagactctctgtcctggcactgtttgggcaaggctagggaggatcccgatgacctctcagtgcacttgattctttggggttccacatgcaattgttttctattgccctctccctattgcaacgagggtgttgaaggtcaaagcagtcatagggggaaggggcaagaagccactgttctcattctggccagaaactcaaaggtgaggccagagaaggaggaaatagggctggagaggagttaatctttgatgatcagataggccagagaaatgaatgattaacttgtgttgtcttaaaggtcagcagatgcagggaaggctgtggtgcaattttcctttctgaccagcagtgttgttgttatttttttttaatgtgtccaggttccccgtattattacagttccacatcaaggccgagcgcacctcccaccactgccacggcctttgaccatctgtagttgccatggggacggtgggagcgactgagcaacaggaggactcagcctgggacaggccccagagagtcacacaaaggaatctttatttattacatgaaaaataaccacaagtccagcattgcggcacactccctgtgtggttaatttaatgaaccatgaaagacaggatgaccttggagaaggccaaactgtcctccaagactccttaatgaggggcaggagtcccagggaaagagaaccatgccatgctgaaaaagacaaaattgaagaagaaatgtagcccccagccggtacccaccaaaggagagaagaagcaatagccgaggaactcggggggatggcgaatggttcctgcccgggcccaaggggtgcacagggcacctccatggctccattattaacacaactctagcaattatggaccataagcacttccctccagcccacaagtcacagcctggtgccgaggctctcctcaccagccacccagggagtcacctccctcagcctcccgcctgccccacacggaggctctggctgtcctctttctccactccatttgcttggctctttctacgcctccctcttgggcatgggctgagggctggagcgagtccctcagaaattccaccaggctgtcagctgacctcttttgcctgctgctgtgaaggtacagcaccaccccaggtcctcctgcagtgcggcatccccttggcagctgccgtcagccaggccagccccagggagcttaaaacagacattccacagggcctgggcccctgggaggtgaggtgtggtgtgcagcttcacccagggcagaacaaggcagaatcgcaggaaacccgcttccccttcctgacagctcctgccaagccaaatgtgcttcctgcagctcacgcccaccagctactgaagggacccaaggcaccccctgaagccagcgatagagggtccctctctgctccccagcagctcctgcccccaaggcctgactgtatatactgtaaatgaaactttgtttgggtcaagcttccttctttccaccccccagactttggcctctgagtgaaatgtctctctttgccatgtggggcttctctccttgatgcttctttctttttttaaagacaacctgccattaccacatgactcaataaaccattgctcttcatctcaggctttggggttggctggagaaggaggcaccccggggctgggctttctcccaagaacatcagagctgagtagccgacaaactcactttggggccgtgggctggaagggaccatctgatgccccagagctctggcttggccttctccctctgcctttaattcacgttgaacgctgggtacctcactcatcccaagttcttcaacactgagcaaatgcaagaatagcacagtattgagccaaccataaactccccacaaggagttgctgttgttattaacaggaagccagagaatcagcagggtgggttagtgagggatccgggaatagctgtgactggagcctgcataaacagctctgaagggagagagaagactgggctctcttgtgtgccaagcacagtatggaaggcttcatataagttaagctgaaattagccctgttttacatacagcttcattttacatatgaggaaactgaggctttgaaaaaaatgagatgtcttgcccaagatgagaagtagtagattcaaccaagtcctcttactctaagcccaacgcttttacccaaaaccccagagtcctctcatcagggatgccaaatggttctagacccagtggaggttctggagctgccactggggatttaatttcttttgatttgctaaagatttgacctgactgaatggagaggtagagtgtagtggggccaggacaaggtgagggaggctgtagagacttaggactttaggccaaccacctccaggaaatttgggaaatgcaatgtgaccgctcgggctctgcactccagggggctgtctggtgtccacatggaccttctccatgtgagacacagctggaacaagggggcaggggcctgcagctgggatgcccaggtgaatatgggcagctggacaaacaacactgggattgagtcagatagaaggggcccaaggactccagggctgggaggacagaggctgggagagagggctcttacctccttaggcctcccaaagagcggttagggatgctgccatggatggcatggcagggggaaccctcctggaagaaaatccatctcttctgaagggatctgagatgcggctggtttttcaatggcagaacttccctctgcagcgcgactccgaatccatgacatctgagagtcttcctgaccacaaacctctgggatcccgagtgctccctacccaagaatcactttgagcacagcatcccaaggaacccatagagcgatcccttgcattcacagccacagcccctctggggacactctgtacccccggcagaccctttccaactcacaacaaataaaggggcttgggctgtgctttggctaa

SEQ ID NO: 78 - DNA, 5915 bp, Homo sapiens
  source 1..5915: mol_type = other DNA
gcgtgagtgagtacagaagggaaatgagtgagggggcatgggatctcagagaaaatcagggccctctgagcaaagtggaaaggacgaccgccgcagctcctcgggccgtagctcgaccccgccttcccttttgcgcagaatcctcgccttggctgcagcagcgcgctgcccccactggccggcgtgccgtgatcgatcgcaggctgcgtcaggagcctcccggcgtataaataggggtggcagaacggcgccgagccgcacacagccatccatcctcccccttccctctctcccctgtcctctctctccgggctcccaccgccgccgcgggccggggagccaccggccgccaccatgagttccttcagctacgagccgtactactcgacctcctacaagcggcgctacgtggagacgccccgggtgcacatctccagcgtgcgcagcggctacagcaccgcacgctcagcttactccagctactcggcgccggtgtcttcctcgctgtccgtgcgccgcagctactcctccagctctggatcgttgatgcccagtctggagaacctcgacctgagccaggtagccgccatcagcaacgacctcaagtccatccgcacgcaggagaaggcgcagctccaggacctcaatgaccgcttcgccagcttcatcgagcgcgtgcacgagctggagcagcagaacaaggtcctggaagccgagctgctggtgctgcgccagaagcactccgagccatcccgcttccgggcgctgtacgagcaggagatccgcgacctgcgcctggcggcggaagatgccaccaacgagaagcaggcgctccagggcgagcgcgaagggctggaggagaccctgcgcaacctgcaggcgcgctatgaagaggaggtgctgagccgcgaggacgccgagggccggctgatggaagcgcgcaaaggcgccgacgaggcggcgctcgctcgcgccgagctcgagaagcgcatcgacagcttgatggacgaaatctcttttctgaagaaagtgcacgaagaggagatcgccgaactgcaggcgcagatccagtacgcgcagatctccgtggagatggacgtgaccaagcccgacctttccgccgcgctcaaggacatccgcgcgcagtacgagaagctggccgccaagaacatgcagaacgctgaggaatggttcaagagccgcttcaccgtgctgaccgagagcgccgccaagaacaccgacgccgtgcgcgccgccaaggacgaggtgtccgagagccgtcgtctgctcaaggccaagaccctggaaatcgaagcatgccggggcatgaatgaagcgctggagaagcagctgcaggagctggaggacaagcagaacgccgacatcagcgctatgcaggtgcggcacggccagaaacacaggggggcgggggactcgagcaagggggggagttggtgcgcccagaaagtggagaccaggggtggtgcggctgcacgcagctcttagggatagggcttggctccttggccactgtgtgggaggggtggggcacttgaagggcgtgagtgcgggcgccactgtagtctgggagtgtgctccgtgctgctgcaccggcgttccgcattaaagctgcccagcccttgttgggtgggggaggggaagacgtgggaattgggcgttgcctccggcctgcagtgagatcagctctctactgacctgcattaaccacaagttactttgcagcaactatcggatcatctagttaataaatagtagagtgaacaactctcaattaattctgaaggattactgtgaccagcatgctttatgactagttttaccaaccactcccttcctttatttagtaggtagacaggaaaatagtcaacattgttttaggtagttaactagtgatgttcatagtaaaccatttccttttaccttttttttttctttttttctttatgtgtaaaatcttctacaacatttctgtttaaacatctccatcttctggggagtagaaaaaatacaattttaaaaagatctccattttaaaacatctccatcttctggggagtagaaatttttttcttcttctggggagtagaaaaaataatttagatacataggaaatatttcatagaaaataatttttttcttttttttgtttacatctggctattttcttctcataaagaaaggcattagtttcctggcatgtaacccagctaaagaagagttaatcagtgaatgagagacacagtttttctatcaacttagtctgtttgcatgcattttatgatgatcattaaacagtattaagtaaagaaacagaagaacagaattttcgtccatcttttttttcatctcaggcttcatgaacttgggtattttaggcatgaaggtttttcaaaagatacaggaagttattctaggagagattttatcaaaggtgtgcaccttgattttaatcgaaactaggcctttgcaactacactacagtaaaataatagaagggatttatgctcggattttttttttgttttatttttgtcttcaaacaggacacgatcaacaaattagaaaatgaattgaggaccacaaagagtgaaatggcacgatacctaaaagaataccaagacctcctcaacgtgaagatggctttggatattgagattgcagcttacaggtgaaaatagaggggcaaagacagcagccattaaaccttaggaagaaaatcagatcccatttaaagttatgttggatcagaaaccttcaataatagtccttttgaaataatgaagtgttagtttttggcttcttccaagaagagggtatttagatatataagaatttaaccctgtaattaggagtcctgtttttatcttgtcattacactttaaatctaataggatgatttatttatattttttctggtctccatcaaaagatccccaggcattaagtattgataaatcccagccctgctcctgcttgcctttgtgtttagggtactcagagcaagttgtgaaacacaggtgttttttaacctcaccttgcatctgcatccccaggaaactcttggaaggcgaggagacccgactcagtttcaccagcgtgggaagcataaccagtggctactcccagagctcccaggtctttggccgatctgcctacggcggtttacagaccagctcctatctgatgtccacccgctccttcccgtcctactacaccagccatgtccaagaggagcagatcgaagtggaggaaaccattgaggctgccaaggctgaggaagccaaggatgagcccccctctgaaggagaagccgaggaggaggagaaggacaaggaagaggccgaggaagaggaggcagctgaagaggaagaaggtatgataagaaaaaacccctgcaacttcaagtgtaaactgggtgtggagatttgttaggaggtggataagacaaatgaagccttgctcatttattcatatatgacattagaatcataaataaattttctgtttgtttagcaaaactttcctaaggcatctactctgaatgaggtgattggtcaaaattttcattttttaatataatcatttaacacagcaggttggtgtcctaaagaacaaaaatagataccagacacataatgaaagaaatattgaggttaagtcttggagaggagcagagcttcccatacctagaagtgatctcattcgatttaaatatgtgttcagtggcaaattattcatggcaagctttgtctgttacatgtgcttttggagagagtggagctgggaggttttggtagcattctgacagttgtgtttgcaaataaaacctttgcagacatgttttgactggacttaccctggatttgcattttgtacattttctttttatgttaaagctgccaaggaagagtctgaagaagcaaaagaagaagaagaaggaggtgaaggtgaagaaggagaggaaaccaaagaagctgaagaggaggagaagaaagttgaaggtgctggggaggaacaagcagctaagaagaaagattgaacccccatttccttaattatttcaggaataattctcccgaaatcaggtcaaccccatcaccaaccaaccaaccagttgagttccagattctatgtgaattaaaaagtcaatatatgtataattctgagatgacttaggttggacattcaatgttgtgctatgaatttcctctttatgcagagtatctgtttgcttgcagagtggctttctggcttgctgccagcctgtgcatggaccacgcttatgagttcaggatctacggcaatgtgaatcattcagatgtttacaataaaaaacaccacatgagtaaatgaattcactaatgttaatgttaaacttcatggaaaaatagtcctttgaaccttcggtggttagcaattaaagaccctgagttatgtgcaataaatagtaaataaagttataccgaatgatgtattttttgctgtggttgttacttaattaaaataccttaaagatggcaccaatataaagtatataccagtggactattgacctccaattttttaaaaagttgaaattttaacaattaccaatacttttttttcttccttcaattggaaattctgagggatacagttatgtcatgattacttgtgaaatctctccccacaaaaattttactgataataaacatgagtaaatgagaaagtctataaataacaatagactttgcctcataacacgtgttgtgttaggttttgggatggctttctagggagcaattctgaaattacttgacagatacactctttatggtaaacaggtcatttcagagtctagagtgctaaccattacactatggaaccatgataaataggtcatttcaaactgatatgtcacaatgcaatatggatagaatatgaatcccatacattcatccctataactgcattttaaaatatagtctaaatatcatgggaggaggttaaaacctgagaacatggtacaataagaaggaataattttttatctatatataatttcaggagaagggattaaaactaccaaaggttatttgccactccactgcaaacatgttgcctgcaatcctgagctcatgatttagtgtgttgttaagcgtaattctgttgcctcaagtaaataccacttaatgctacacatttttaaacctttaaaagctacagacacaagtaatgaaattatgagtcacttaaggggggaggtaatatgcttgtatgttacattgacattgctctgcatgtctctactgggagatatttggatttcaatgatagcttgactggttggacattgcatcaaatacacgccccatgtatcctttctgtcgtaaagttaagaacgctcttgcatttgatgtggaataaatatagatgatattactatctgctattctgcctttgttctgaaacaattgctttgtcagctaatttcattcaatatttgttttttagacgatctctataagttattaatttaacctgaaaccaaagtggtctccatttaaagttacttaatccctttgtaccacctatttctagttaaatatatgttgctatgcaaataggtaaagtgcttccttgccatgatggtaatggattggaactatgaaggctctcagtgtattggcttctgtaaagatgaggcgtctcctcagaaacaaaacttttcacatttctgcttactagacctgggttgatgtacatggtaagtctcaaacagatgcaagctatgtgcaaaaagtaactttagccaaatggaaatagctggatgctttgagaattacttggttgaagtaagaaaactgtaccatcctctatcctgtgtgccataataaaatagtaaaaaacctaaa

SEQ ID NO: 79 - DNA, 3862 bp, Mus musculus
  source 1..3862: mol_type = genomic DNA; note = Mus musculus strain C57BL/6J
cctttccctcttctcccccgttcttctctctaggtcccccatctccgccccgggcctgaggggcgcaccggccgccaccatgagttcgttcggctacgatccgtacttttcgacctcctacaagcggcgctatgtggagacgccccgggtgcacatctccagcgtgcgcagcggctacagcacggcgcgctccgcgtactccagctactccgcgccggtctcctcctcgctgtccgtgcgccgcagctactcgtccagctctggctctttgatgcccagcctggagaatctcgatctgagccaggtagccgccatcagcaacgacctcaagtctatccgcacacaagagaaggcacagctgcaggacctcaacgatcgcttcgccagcttcatcgagcgcgtgcacgagctggagcagcagaacaaggtcctggaagccgagctgttggtgctgcgccagaaacactctgagccttcccgcttccgcgccctgtacgagcaggagatccgcgatctgcggctggcagcggaagacgccactaacgagaagcaggcgctgcagggcgagcgcgaggggctggaggagactctgcgcaacctgcaggctcgctatgaggaagaagtgctgagccgcgaggacgccgagggccggctgatggaagcgcgcaaaggtgcggatgaggccgcgctcgcccgcgccgagctggagaagcgcatcgacagcctgatggacgagatagctttcctgaagaaggtgcacgaggaagagatcgccgagctgcaggctcagatccagtatgctcagatctccgtggagatggacgtgtcctccaagcccgacctctccgccgctctcaaggacatccgcgctcagtacgagaagctggccgccaagaacatgcagaacgccgaagagtggttcaagagccgcttcaccgtgctaaccgagagcgccgccaagaacaccgacgctgtgcgcgctgccaaggacgaggtgtcggaaagccgccgcctgctcaaggctaagaccctggagatcgaagcctgccggggtatgaacgaagctctggagaagcagctgcaggagctagaggacaagcagaatgcagacattagcgccatgcaggtatagtacggtttaagctcagtgggggtggggaggtccacggtaggggcggcggcggggggggggggagtcagggtgtacccagagagtgaacgctagggggttctagagcacagagcagctatcagagggcttggcttccgagaggttgtggaaaggatggggcatttggagggggcggggcgcgactgctgcctggggattgcttgttctggttgaatcagggttgttaggggtgagttgggaggaaggggcggagggagtcggagttgggcgttgccaagtaatgccttctctttactgacaacccttaactcccaagttaccctcagtacttcctggatctcctggttaataaatatgcctgctagctctcactagttttgggccacccagccttgggatagtttttttttttaatagggacacaagaatacagtcacaatattttagcaattaatcactgcagtccattaaaaaaaaagttcttcatctttggcggggggaagcattttagacaaacagctacacaaatatatataatttaatttttatttatatatttatttagacaaacacacacacactatatatatattccccttcccaaatgcgacctggctaaaagaaatgtgacaagggtggttaataataataataatatcatcatcaatttggtagttttaaaagacagcttaccataatcaattgagaacaattttcaaaattgttcacatcagtctactcccctcctcttcctcctctccttctcttgcttcactagactgggcattttaggccaacccctccccctatgccccaccccaccccattattttaagggagatttctggaaggtgtacactttggagttaactaagaccagaacttatcatggatactacagtaaaacaaatgcagtagagatttgtgttttgaattttttaaaacaatcttcctacaggacacaatcaacaaactggagaatgagctgagaagcacgaagagcgagatggccaggtacctgaaggagtaccaggacctcctcaatgtcaagatggccttggacatcgagattgcagcttacaggtaacatcagggtggtgctggcagtgggcatggcggctcaggacagagcagatgacccagtcagtgcagttatagtgagtcccacgtgctctagaatagtcctactttggtcttcctccaagagggtacaaatgtgtagggaattaaccctgaagtaacataagccctgttcttagcattcatattttaaacctaatagggatgcatagaaggtctttttgggtggggtctctcgtgaactccttattaaattttgattatgcctaaccgtatttgttcttgtatttgcctttgaggttggttgtagaggaaagtaatgaatgtgggcttagagcaatgaacacatccagccttgctctaactgtactcttcattccctctccaccagaaaactcttggaaggcgaagagaccaggctcagtttcaccagcgtgggtagcataaccagcggctactctcagagctcgcaggtcttcggccgttctgcttacagtggcttgcagagcagctcctacttgatgtctgctcgctctttcccagcctactataccagccacgtccaggaagagcagacagaggtcgaggagaccattgaggctacgaaagctgaggaggccaaggatgagcccccctctgaaggagaagcagaagaggaggagaaggagaaagaggagggagaggaagaggaaggcgctgaggaggaagaaggtatgaaaagcattaaaaaaaaaccctttcagaatctctattgcaaattggctgtggatttttattgggagatccatgacctatgcaggctttgcttatctaaattctatgtgagctttgcagtcataaacagtgcacatttaacgagaacacacacgtttagtaagcacagatggtaaattataaaacgttcatgtacactcatttaacacagtggtttggtacccaaaggaacatttgatgttggccaaaagacaaagagttgattgcgccctaaagaacatcagtgccagacatatgaaattactgagggcagctcttggagaggagatgagcttccagtacctggaagcaacctccttttacatatcctttaggagagtggggccaagaagtttttagacacagtctgacaatagtgattattagcccacaaagcctcagtagaaatggtttgcctagacctaccctggagttttgtattttctttttatgttcaagctgccaaggatgagtctgaagacacaaaagaagaagaagaaggtggtgagggtgaggaggaagacaccaaagaatctgaagaggaagagaagaaagaggagagtgctggagaggagcaggtggctaagaagaaagattgagccctattcccaactattccaggaaaagttctccccaatcaggtcaacctcatcaccaaccaaccagttgagttccagatcctatacaaattaagaagtcaatacatgtataattctgagatgacttaggttggactttcaatgttgtgctatgaatttcctccttacgcagagtatctgtttgcttgcagagtggctttctggcttgctgccagcctgtgcatggtccatgcttatgagttcaggatctatggcaatgtgaatcacacagatgtttacaataataataaaaaaaaaa

SEQ ID NO: 80 - DNA, 6178 bp, Pan troglodytes
  source 1..6178: mol_type = genomic DNA
tacacataacctagcctatttatttgtatctaaaatcccctagccgcaccatcaccgtaaacaccaagggaaataattaaggaggttcctggtgggaaaagggcgagttggggggacagggtgtctgcgaggtgacgggatacagaaaactagggtgtcaaaagggagcaagaatctgttttggggacaacttaaggatccaagtgtcaaggggtctgggcgatgcaggacgggaggggctgcgtgagtgagtacagaagggaaatgagtgagggggcatgggatctcagagaaaatcagggccctctgagcaaagtggaaaggacgaccgccgcagctcctcgggccgtagctcgaccccgccttcccttttgcgcagaatcctcgccttggctgcagcagcgcgctgcccccactggccggcgcgccgtgatcgatcgcaggctgcgtcaggagcctcccggcgtataaataggggtggcagaacggcgccgagccgcacacagccatccatcctcccccttccctctctcccctgtcctctctctccgggctcccaccgccgccgcgggccggggagccaccggccgccaccatgagttccttcagctacgagccgtactactcgacctcctacaagcggcgctacgtggagacgccccgggtgcacatctccagcgtgcgcagcggctacagcaccgcacgctcagcttactccagctactcggcgccggtgtcttcctcgctgtccgtgcgccgcagctactcctccagctctggatcgttgatgcccagtctggagaacctcgacctgagccaggtagccgccatcagcaacgacctcaagtccatccgcacgcaggagaaggcgcagctccaggacctcaatgaccgcttcgccagcttcatcgagcgcgtgcacgagctggagcagcagaacaaggtcctggaagccgagctgctggtgctgcgccagaagcactccgagccatcccgcttccgggcgctgtacgagcaggagatccgcgacctgcgcctggcggcagaagatgccaccaacgagaagcaggcgctccagggcgagcgcgaagggctggaggagaccctgcgcaacctgcaggcgcgctatgaagaggaggtgctgagccgcgaggacgccgagggccggctgatggaagcgcgcaaaggcgccgacgaggcggcgctcgctcgcgccgagctcgagaagcgcatcgacagcttgatggacgaaatctcttttctgaagaaagtgcacgaagaggagatcgccgaactgcaggcgcagatccagtacgcgcagatctccgtggagatggacgtgaccaagcccgacctttccgccgcgctcaaggacatccgcgcgcagtacgagaagctggccgccaagaacatgcagaacgctgaggaatggttcaagagccgcttcaccgtgctgaccgagagcgccgccaagaacaccgacgccgtgcgcgccgccaaggacgaggtgtccgagagccgtcgtctgctcaaggccaagaccctggaaatcgaagcatgccggggcatgaacgaagcgctggagaagcagctgcaggagctggaggacaagcagaacgccgacatcagcgctatgcaggtgcggcacggccagaaacacaggggggctcccactggagcaagggggggagttggtgcgcccagaaagtggagaccaggggtggtgcggctgcacgcagctcttagggatagggcttggctccttggccactgtgtgggaggggtggggcacttgaagggcgtgagtgcgggcgcgactgtagtctgggagtgtgctcggtgctactgcaccggcgttccgcattaaagctgcccagcccttgttgggtgggggagggaagacgtgggaactgggcgttgcctccggcctgcagtgagatcagctctctactgacctgcattaaccacaagttactttgcagcaactatcggatcatctagttaataaatagtagagtgaacaactctcaattaattctgaaagattactgtgaccagcaagctttatgactagttttaccaaccactcccttcctttatttagtaggtagacaggaaaatagtcaacattgttttaggtagttaactagtgatgttcatagtaaaccatttccttttacctttttttttcctttttttctttatgtgtaaaatcttctacaacatttctgtttaaacatctccatcttctggggagtagaaaaaatacaattttaaaaagatctccattttaaaagatctccatcttctggggagtagaaatttttttcttcttctggggagtagaaaaaataatttagatacatgggaaatattttatagaaaatatttttttttcttttttttgtttacatctggctattttcttctcataaagaaaggcattagtttcctggcatgtaacccagctaaagaagagttaatcagtgaatgagagacacagtttttctatcaacttagtttgtttgcaggcattttatgatgatcattaaacagtattaagtaaagaaacagaagaacagaattttcgtccatcttttttttcatctcaggcttcatgaacttgggtattttaggcatgaaggtttttcaaaagatacaggaagttattctaggagagattttatcaaaggtgcgcaccttgattttaatcgaaactaggcctttgcaactacactacagtaaaataatagaagggatttatgcccggctttttttttgttttatttttgtcttcaaacaggacacgatcaacaaattagaaaatgaattgaggaccacaaagagtgaaatggcacgatacctaaaagaataccaagacctcctcaacgtgaagatggctttggatattgagattgcagcttacaggtgaaaatagaggggcaaagacagcagccattaaaccttaggaagaaaatcagatcccatttaaagttatgttggatcagaaaccttcaataatagtccttttgaaataatgaagtgttagtttttggcttcttccaagaagaaggtatttagatatataagaatttaaccctgtaattaggagtcctgtttttatcttgtcattacactttaaatctaataggatgatttatttatattttttctggtctccatcaaaagatccccaggcattaagtattgataaatcccagccctgctcctgcttgcctttgtgtttagggtactcagagcaagttgtgaaacacaggtgttttttaacctcaccttgcatctgcatccccaggaaactcttggaaggcgaggagacccgactcagtttcaccagcgtgggaagcataaccagtggctattcccagagctcccaggtctttggccgatctgcctacggcggtttacagaccagctcctatctgatgtccacccgctccttcccgtcctactacaccagccatgtccaagaggagcagatcgaagtggaggaaaccattgaggctgccaaggctgaggaagccaaggatgagcccccctctgaaggtgaagccgaggaggaggagaaggacaaggaagaggccgaggaagaggaggcagctgaagaggaagaaggtatgataagaaaaaacccctgcaacttcaagtgtaaactgggtgtggagatttgttaggaggtggataagacaaatgaagccttgctcatttattcatatatgacattagaatcataaataaattttctgtttgtttagcaaaactttcctaaggcatctactctgaatgaggtgattggtcaaaattttcattttttaatataatcatttaacacagcaggttggtgtcctaaagaacaaaaatagataccagacacataatgaaagaaatattgaggttaagtcttggagaggagcagagcttcccatacctagaagtgatctcattcgatttaaatatgtgttcagtggcaaattattcatggcaagctttgtctgttacatgtgcttttggagagagtggagctgggaggttttggtgagcattctgacagtcgtgtttgcaaataaaacctttgcagacatgttttgactggacttaccctggatttggattttgtacattttctttttatgttaaagctgccaaggaagagtctgaagaagcaaaagaagaagaagaaggaggtgaaggtgaagaaggagaggaaaccaaagaagctgaagaggaggagaagaaagttgaaggtgctggggaggaacaagcagctaagaagaaagattgaacccccatttccttaattatttcaggaataattctcccaaaatcaggtcaaccccatcaccaaccaaccaaccagttgagttccagattctatgtgaattaaaaagtcaatatatgtataattctgagatgacttaggttggacattcaatgttgtgctatgaatttcctctttatgcagagtatctgtttgcttgcagagtggctttctggcttgctgccagcctgtgcatggtccacgcttatgagttcaggatctacggcaatgtgaatcattcagatgtttacaataaaaaacaccacatgagtaaatgaattcactaatgttaatgttaaacttcatggaaaaatagtcctttgaaccttcggtggttagcaattaaagaccctgagttatgtgcaataaatagtaaataaagttataccgaatgatgtattttttgctgtggttgttacttaattaaaataccttaaagatggcaccaatataaagtatataccagtggactattgacctccaattttttaaaaagttgaaattttaacaactaccaatacttttttttcttccttcaattggaaattctgagggatacagttatgtcgtgattactcgtgaaatctctccccacaaaaattttactgataataaacatgagtaaatgagaaagtctgtaaataacaatagactttgcctcataacacgtgttgtgttaggttttgggatggctttctagggagcatttctgaaattacttgacagatacactctttatggtaaacaggtcatttcagagtctagagtgctaaccattacactatggaaccatgataaataggtcgtttcaaactgatatgtcacaatgcaatatggatagaatatggatcccatacattcgtccctataactgcattttaaaatatagtctaaatatcatgggaggaggttaaaacctgagaacatggtacaataagaaggaataatttttatatataattttttatctatatataatttcaggagaagggattaaaactaccaaaggttatttgccactccactgcaaacatgttgcctgcaatcctgagctcatgatttagtgtgttgttaagcgtaattctgttgcctcaagtaaataccacttaatgctacacatttttaaacctttaaaagctacagacacaagtaatgaaattatgagtcacttaaggggggaggtaatatgcttgtatgttacattgacattgctctgcatgtctctactgggaaatatttggatttcaatgatagcttgactggttggacattgcatcaaatacacgccccatgtatcctttctgtctgttgtaaagttaagaacgctcttgcacttgcatttgatgtggaataaatatagatgatattactatctgctattctgcctttgttctgaaacaattgctttgtcagctaatttcattcaatatttgttttttagacgatctttataagttattaatttaacctgaaaccaaagtggtctccatttaaagttacttaatccctttgtaccacctatttctagttaaatatatgttgctatgcaaataggtaaagtgcttccttgccatgatggtaatggattggaactatgaaggctctcagtgtattggcttctgtaaagatgaggcgtctcctcagaaacaaagcttttcacatttctgcttactagacctgggatgatgtacatggcaagtctcaaacagatgcaagctacgtgcaaaaagtaactttagccaaatggaaatagctggatgctttgagaattacttggttgaagtaagaaaactgtaccatcctctatcctgtgtgccataataaaatagtaaaaaacctaaa

SEQ ID NO: 81 - DNA, 191314 bp, Homo sapiens
  source 1..191314: mol_type = genomic DNA
agtcgactcaaccaccggagtggcccctgcagttggatagcaacgagaatcctccaggggtgcagggcgacggcttcggccgcaccgcgggctagccagggctgcgtgcccgcctctgaccctcagcagaggtgtctctggccaggaggagctgaagttctgcaggacattggtccgcccgcggacagtccactccgcggggactttctctggataaggagtgcgtgcgagtggctcccaggcagacagggtgtctagaaggctacacgctagggaaggtggctccttggatttaaagaggaggaaaggagggggcatctaaactaggctttggagagaactaatgggaggggcgcccggggtgggggggcgggctggaaaacagaggggacagccaggactggtgttgggtgtcagggaacagacggagcggactgcgtgggtccagccaaggaaagtgaagcaagcagacttgtttgggtcaaggttgcctagggaagcggagcacttaagtgcctctttttccccttctccagcctcctccacagtggtgaggtcacagccccttggagccctccctcttcccacccctcccgctcccgggtctcctttggcctggggtaacccgaggtgcagagctgagaatgaggcgatttcggaggatggagaaatagccccgagtcccgtggaaaatgaggccggcggacttgctgcagctggtgctgctgctcgacctgcccagggacctgggcggaatggggtgttcgtctccaccctgcgagtgccatcaggaggaggacttcagagtcacctgcaaggatattcaacgcatccccagcttaccgcccagtacgcagactctgtgagtacccgggagagatcagggtaggacccagagatcaagggcatctgcagaggtggcccgaagtgcacaaaagcagctcaataacagcccgaagtagtgtgtgagtgtgtgtatgtgtgagtgaatgtctgtgtgtgtagatgtgtgtgtgtgctaaaaacttaatcgcccacacttgggaaggtatcattgttgacatcctcattcccaacacaggaaaatgttacaaaactttggtgtacaatgaccgtgagagctgttctttccaacaagctgctattcagcactttgcctaaccctggttgaatctgttttatttgaattaataaggataatggcatctcaggaactgacctttttgatcttaccttgggtaataaaaaattgcaaaaatatgtatttctcctttttgtttctctagatgggaggttatcttagcagttctgctgattcatcaaattgttgacaaaggtttaagcaggggccctttttaaaatgaactgtctatacagtatctgtaagttacttactcaaatgtgaactgccagtgaaatagtacgtccagaaccctgctttgtgatagaggtataaagaaatgaaatttcataaaagtatagtacatttatctgcatgttaaatgttaccagattagaaacctgatgttaaataagattatacacacacaacctgtttcttaacagcaatttaaatcagtgatcattgaaattgtagacaaaaccaagggaataaagtctgtcttgattagttaaaaagagaacagaaagaaaggacagtaaaacaacctaggctggttaaatccagttaagataaaaaaaaatgcaggttattaaagaaaatgttgatagatgaaaagaaatgggaaagttgcacctctagattttctcaagaatttagctcatgaagactatttaacagtagatgaatatttgagcacagagatatatttctgtgctcagagatatcctagtgtcttagcacacctgaattaattagttcaataacctccaaacagtgtggtagtcattctccatgctgccaccacagaataagatgtgtaaaaggtgtaatggcctcttgattacacctctacataggttgcttgtcacctctagaataaaattcttttgtgcagcctaccagatctttcaagacctagtcaagtctttccaacctcattgctcctcatttctctaacttccccctcctgctgagaacttctggcacttccccaaaggtccctgctgttacagctgcccttgcctttcttcccactttctggcccctctgcctgaagcacatttcacccatttcttcacccagctaatgcctactcccagatccagatcctggatcaaccctgcaggaagcttctcctgacccatgaccttcaggctgggtaagctataccccccttcccaacagcgttctctgcatgaacctaaccctagcccttagacattgtctactttcttgtaacttgttatttatttgcatgcccactcaagcaggacacaagcttctctaacatagggaactgccattcaaccccgaattcctgaaaccctggaactacttagacactcagaaaaaacaaaaaaaaaaaaacttaagtgaataaataaacaaatgaatatgccaggtctctgaatgtccactctatgttggggagaaagaaatccaaagacatcacttcttcagagacttctttaacagtggcagaaattcaagtcattgaagagagatgtggctctgacagtgaaaaggaactcgtagacatcctgtttaaaattccaccaaaagttgagaaagaaagggtaatggagaatgagcaatggaacaggagtcaggaaaccagcattctctttagcccttctttactaaccatgaaattgtgtaagatgactgatttggaaggagccaaatttccttctgggtaaaagagaatgttcaactaggtgctttctaggtgatgacatgatgctgatgagaatagtctgagggaaggcactgaatcacaagaaaaagacataaagacagtggcaaggaggatctgcccttgagaataatggagagggaggtagtatgtcctgaagaataaagttattctgagatcgaaaagagaaacctgataaaaagtgtgggtaaaacaaaatggtagtctcctttgaacaatggctactaccatctgcaacagtagaaaaatgatttttaaatcttttgggggcggtagaactctttgttgaagaaaagcatatgagagaagtaaaacatgtaaagctaacaattatattgtgtttacttacgggggcggggggtcctgttctcagcgctttgcatgaactcacccagtgaatcctcaccaaatccaattaagtaggtgatgttattatgctcattttatagatgaggaccttgaggcacaaaaataaaatgaagtaatttgctcaatgttgcacagcttgtaagtggtaaagtcaggatttgaatatcatatcatcaactatggagcctgcacccttaagccaccactctcagatgagaagtgtgtctcaccacaccagtgttcccctgatggtcataggctttggagaaaaaagtctgaaaacaagtcacattcagtaaaccgactgataacctcgggggctattcatcagatgcaagaactcagaaagcaggaggttagcagggaaaggaaagaagaaggaaggaagaaagagagagtggaagagaggcaaggaggacaagaaagactaagttagtctttcttgacaagaaaatctagatctttttttacatctttctagacaagaaagatctaagttatggaaggtattccttgctgaaataaaccaagtttttgtcattaaaaagccgttctgggtggtgacctctttttggaatctacttaaattatacaggatctactactgaggcatgttctctcacaagttttgtattattcagagtgtacctctttttaaagtttttgaagagcttacactggtttaaaatgtaaggtattttgttcctgtagagttatttgcattacttctgcaaccttcattaagatgctgtataaccacttcttagacattttacaaattatgatggtgccgagaacaactctttctaaactttatcttctactcatagattattgttctgaaaggtaaacagctctcttgccctactacccatatcccagccccgtggtcttatggatgcaggggagagagttacggactgtggccctcactgaagaagtgatgctgtatcttttcctcactcctcccctccagaagggtatgatgctttacctgagtggaaggtgagggagagctgggatccctacttcccccactgccagtggaacattctagaatctttgatgtgtaggtagtttgaaaaaaatcactctcttccattgaaaattactgatttaaggaaacttaaatgaagcaagagaataaaattaaaaatttaaatgttggcatataattatagatcatatatctcaaaaccaaggataacaagattgacccatcaccctctcttactcagaaagttgccatttgttgcctctgtgcatgagaagatccttccttctctgaataaggaggtagaaaggatttgacaaccattctgcaccactctatgtatttgtgtggattcttcctccagaaagtgctggcacgccttactgtgttgttttaaccctgctttcagtttcattatgacagtaactgctacatctgccttctccaaccccactgccatctgtggtcttgggtttcgacgaagtaagtggtttggacacctgtgtgccttcagatatgtttctgaaggagctgttgttttcaggttctgtttttactcatttgcattctgcatctgtggctctaattgatggactctcctactgtttactaaactgaagacaatcattcatcatctttggcatttgtaccctgtgttccatctgtgctgttatttactcagtatttttaagttgactcgcttctctaactgaaatttatttagaaaggttacaagtggaaaattagcatgacttcgtacaaataagaggtaaccagaaaactaaagacagaaaaaacaaaaatataattaaattctagctacagactattgtctgtgaatacactgagcctacagctgccttctctttgttaaaaaggaagcaaagtaagtgttaataagtattaaagagataacaatctggcacggtgtccttggtagtatcgaaaggatggaaagacaatagagaaaggaattactttctcactgtgtgattcacggttatttaatgccaggtgggcactccacctaaaataatctcacgtacctccaagtcatctttgttccacacttaaagaaatgtggatgttttgtatatttcacaatggttttagtcacaatcagtggttgtaatctgaataacaattgtttccaagctaaagagaagccccctgcttcaacacccacgtgctccccaaacacagccccacacatataaaggtgacttcatttcatatatccaggctctgtgaattattcttttccattctctctctcctctcccatacatatgaaacactgttctaagaggagtgaagaattctgacctgaaagttaaagggatttgatttattcacttggaatgaacataataatgaacaataaaatgtgtccatcatatatatatgagagagaatatatagagagagggaatatatctgtatacctatgtgtatatatatttagacagatatatatgtgtgtatttaaatcagtcaaggtttctgatgataagtaacagaaaaccaactctgtttaggttaaggaagaaaaaaaatattttgaaagaacatgtaatttacagaattactgtaggaccaggctttgaaaataggccaaggcctactgtgggcaaggaactggagccacagtgaatcatctgtttaggacaattccatgggcaatatagaaaccacagccactggacatctgcggtcttgtagctgccagactgtctatgtgctgccatcaataatttcccaactgtccctgtctctttaaatatcctacctgggagtagtatcctgtatgggagcatttgattggctggcaagccatagctgctggaggtaggaagagaaaggtggtcacccgcccacttttggcgtctgaaataggagacgcagaactgggtccttctaatattccacacaacaggggattccccactgaagaggggccatatgccctctacattgctcattacttccttcattctgcaaatctttactaaggactaactatatcccagacactgtgtcacactctggacttaatggagaacaccaccaacacgtccctgtctgcagggatcttacagtctagtgtgggagctgcatattaatcaaataattacataaacacagagttataattgtataagtgtgcttgagtatgctctttgtaggggtgagggatatttacttaaactgaggttcagcgaaggctttgagctacctcctgaagaaccagtaggagttgagtgtaagaagtttcagtggagcaggtagaaggtggagatgtggtgttcaagagctttgaagaattctgacctgaaagctgaaggggtttgatttattcacttgggatgaacatattaatggacaataaaatttgttactactcccttcataactcagtacaggttgaggtgaattctgatgtccttgggagcagtttctatgcacacacaaaaaaaacagttaatgggggtagctggcttcgtaaattaatatttggtttgttaaagaaataaatgtaaaacctagttctttattgagttttctatgtatttattattttgtttggaaatctaatcgtaacaattactttgaggagtattttatcatttaatattttaataactgatttcccatatagtttaatcaaataataaataatttaaatgaaaacaaatttaatgtattttattttaaagtacttgaatgcttgatgaaaccttcccaatccttagaaaatttgaaaacatctattatattaaactttataagtaccaggaatcctatgtttttagattgccaaactctggagtgagatcctccgggttgaatgccttggtctgctatttcctaaatatgctttgggaacattgcttagttcctctgggcctcagtttctccatctataaaaaaagagtaataataggccctgactcaccagattcctgggtggtatgaatgagttaatactgtcaacagataattttcaaagaaaggaaaaattgtaactttcatacacctataaattgaacacatgttaaagattttaatgaactcattgatgagtgtatatgaattgcctaagattgccataacaaagtaccacaaactgagtggcttaaaacaacagaaatttactctctcacagttctggaagctaaaagttggaaatcaaggtattggcagggtcatgcttcctctgaaggctcttgggacaaatcctttctggctcttcctaggggctggttgctgttggcaatccatggcattccctgcatcactccaattattggttttaggctcaccctcattcactatggactcaacttaactcattacatctacaaacattgtatttccaagtaaagtcacattttgtggttccaggtagatatgaattttgggggcatgctttaacccaccataatgaagaacctggtaagatattacaactggcttaaagggtagcccaccaactagacatatttataaattaggaatatcagagtgactatgcagatggaggccaaactagcttcttccctagtcagggagggaagttcatagaagctcttccatacgggacagaatttacaatccgtagacaaaattgttttgcattgctacaattatctacaatctagaaaggtgtaaaataattcccatagaatcagactgagaaacttggaagggtgtgctctagtcaattcacagcttttcattgaaacacatttttccccagtaatacatgcaaaattatagaaaagttaccacctcccagtgagcactatacaagtaaacttattaaaacctctaatttccttttcaacttaaatcacaagtcaaaataaattactcaattatacattttaaattggaatagcaagaccaatctattagatatcccaagtaggtcaacaacttctgttaatacaaatactcaaaataccaaatatatattgattattcttaaactcaacacaaacatattaatactatgggtctgatttagattctcatttctattgttaactctaaattttcccaagctaaaaaatgtttattaattttaaaaattgatcttcatcccctaatgaactccaggttctttatggaaccatccactggtttccaggttccatatagttagggttgccctatccaaatggaccctcctcttacacctgtaaggcagaaaatatcttttctttacccatcacatggtgcatggctgagaccctacaacaacaacaaaaaacagattgacaagaaaaaaaacattaaacaactattaaatataagttttacatgacacaggaggcttcagtaataaagacccaaaggaacagagaaaactgtatctttttatggacagtcatacagattggaggacaaaaggatatgatcgaatggtaataaactgtggtctgtggggcagatcttagcaagtcttatttgttcaaattcatcttgatgtctttgtgtcttcattccttttctcctggtgtagggagagcccctctgaaatgagggtcttaagacctactttagaggaagaccagagaattgtctgatgacctgactcaggggagaagggcaggaaaaagtcggagagaccttctgcttctgttgttttctcaaatgccaaggtgtcacatttggggatagaatgtcttgaaccccattacatctgtcattcaagtgtagttaatagcattcctttcactctcaaaggtgtcccaatttgggggataaattgctaatactaatagatcttcctattagaccatgaagtccagaggcccgtgggacatgctcagccttgtgtttcattgccgtaggtgggagtctatcacttaaaagaaggttggtctcagccaggtggggtggctcacgcctgtaatctcagcactttgagaggcggagcgggggcggatcacgaggtcaggagatcgagaccatcctggctaacacggtgaaacccagtgtttaaaagtccaacctcaacaatcagatcagttttgatgaggccaagaccattcagacatgatatcagaggcatagatccagaatgtccagttattttcatctgtgtgaacaaattagctatcctggggcctaagtctattctcttagatcacctctgatgaagtagtaagcatagaaaactaattcgtaatacataaaacatattgttaaatgaattagttttgtctgaatttatcagtcaatttactagagtagtagttttttgtccagagctgagaaattaagttgaattgatctatttgattatttcagtgtttcctggttatacaaagtgtgtttgttacccttcagactaaggtttattagacaaaagttcatgggcctccaggagttcatggttgtgctcttaggaatctgtggttgtgtgaaaatttgtccccatcagtgcatttctgagactctataactttccttagatcttcaaaggtgtccttgacccctcacaagttaagaaattctgctttggaataatttggcattttgtaagtgtactcactatgactcaatctttttattatattacaaacaaccctaacagacatattttaacaataaatgaaaatcgcctgacctttgtgtggcaagctgtcacagttagttactacttgagactgtcatttcaacagttactactgttactacttgagaccgtcactaggacagttactactgttactacttgagaccatcattgtgagaatgaacaaaggaatgaacgtagaaatgaaaaagtaagacgaaactgttttaaagaaagtgtccaggggaagaagaagagagctccctgcttctagtgagcaaaggcagcccctgagcttccacagccctttgtatttattgggtagcaagggcagggaggaggaggtaacgattggtcggctgcttaattgatcatgggttcatattgttactaacaggcttcagatgtacctaattacaagcaacactgcgcttggggtgtgactgccctcagcattccttctgggtggaggacgcacttttgtcagtttgccaacattctgcatttatgagaacagtttgctgtttactcatagagcctccagtggtatagtgagttgatcacgaccctcactctttcagcctgcaacacctttgaatgtcatggttttccttctgaacatgttattgtggtgattactttcttcatggctcacacttagcctgtcccttgataggctcttcacacagaagttcactgaatgttgccactttttcaagtcaatagttgacagattttttcaagtttctaatgcctcctacatgatggtaaattcttcatactgactctgtttccatttttactgaagctggtcaacatacttaattactctctttcattacattaattaaaaaatagcatttgaaaattttaagaatgagcaaaatggtcccatttgttcaaaattatagattgagttttaaagtgttccatttagatatcagaccctacttacttggcttcatttctgtatgaacctttaagaacatttagggtattccagaaattttcaaaataattttttaattacaaagttggcacttgtgatttttaagacatcttataaatattgttctcttatatgtggtgacaggtatatgtgctctggatttttatagcacagtcccactgaaaagactgccatcagaatgttccagaaattcaaatatttcatcatccttttaatctaaacttcccacatcacttgcacacctggaaagagcttccttatgtccaaatttttctttcagaaaacatgatctctgtatttatatgacacatgaagcttttggcttatattttgtaggcattaacttaatcttacccatgcctgtgtgttctcataattatgcaactccagcgaggagactgaaattgtttcctcttattgccaggtactgtcactttatattttgttatttcaatctttttttaagccaagaaactagaaggctacttttaggaaagggctctgtgcatgaaaataaagaggatctaaggacgggcataaatgagatactcttccatgagaaagtctttagtgggctttgagatggcagtatttccatctcaacacccttggcagttatttctgggtttgtggacatgatccaaagatttgagatgaccagaaatactacctctagataggtggcattttattgtaaaatgttcttccttctttccttttttatattttaaataaatatgtattgatcacctatcatacactagtactattctaggcattgatatataataaacgacctcattgattttacatcataacaggagaaaatagcaaaaaaaaaaataaaaatttaaaaatttaaaaaagtaaaacagagaatgtcagatggtgaaaagtataatggagaaatataaatgaaggaagagggagaaggaatactggaagttgcattttaaatagtcagcaaggtgtcttagtttgggatcctctaacagaataccacagactgagtggcttacacaataaccatttacttctcacagttctggagactggaagtccaagatgagggtgccggcagatctgttgtcttgtgagggctgcttcctggtttgcacttgaccaccttctcattgtatcttcacatagcaaaaagccaagctcacctctcttgtgttttttattataagggcactaattttgtcataagggttccacactcataaacgaatttcctcccaaaagccccatcttctaatactatcacatcagagattaggatttcagcatatgaatttgggggacacacaaacattcagtccataacagaagccctcactgagaaaatgacatttgaataaggacctgaagaagctaaaaaaggaatccaggctaatatctggaggagaaaaaaaaattatatatatatatgtatgtgtatatatatatatatatatatgcttatttttggaatgagataagaagctattaaggattttgagccacacacacacacaagcaagacctgacttacattttttttttttttttttttgagacagagtctcactctgttgcccaggctacagtgcagtggtgtgatctcgactctctgcaacctgcacctccggattcaagcagttctcctgcctcagcctccctagaagctgggattacaagcatgtgccaccatacctggattatttttgtatttttagtatagatgggttttcaccatgttggtcaggctgatctcgaactcctgacctcaggggatctggccgcctcggcctcccaaaatgctgggattacaagtgtaagccaccccgcccggccctgacctgacttacattttagtaggatcaccctagctactatgtttcttaatcgggtgagagatgatactggcttgaaccagcttaattgcagggaatgtggtaagaaatttcctgggcttattttggaggtgaatccaacaggattttctagcggactatgtggactttgagtaaaagagaggagtcagtgatatcttagtctgaattctccagaaagcagagcccatgtgagaattcttgttggggagtatgatcccaggagcagaaggtaggatggggaagtgaagcagggagagagggagagtttgctgctgctagaaacaaatggttgctgaaacccctgagaccacctgagaattcagatgacttgcatctcaggacccttgctttaggaaggaggaaaggtaaaacatctatccatcagttcttggctcccatgagtcagggatttaattctactgaccttccaggtttcctgtgcctgggtgatgaaagaatttcctgatattaacaaaaaagtccccaggtgggagatgagaggtgtgtggtacagggctgagatgcagtactgtcgagttgtacctgcctgaagctagtcagagctcatacagaactggtagctgcagcagggctagcataagaggcaagctgagagaatctaaaatgatgtaaaacaggtacccagggttggttagcctttgcacaactcagacctgcccaagcttttcattatgtctagctcccataataaaatatagggcctccgattttgtaagaatgagatgtccttactttttttttttttattcttacaagaaaggggaatacaagccccatcttccacagattccttcaagatgcagtccttgcaaagacataatgcaagagggtttgggaaataaactagtctgccctgctgcagctgatcttaaggatgccattgatagtccttatctctctttgactccaatcctagatttgtctcacccttgcccagcactctgactggttgagttgattgcctgatggaaagacccagacttcagctccaagggttctgaaagcttagttgccttgttcttgtcatatatagctgctgtattttctccttcaccattatctgtgggctcaaaagaaccaagagatgccccagtgaattccctgcattctagacacactccttactcttcctaatgtgtagcagctgccctagcttctcatggtaaagagggcctaatatttctcaatagagaaactcctttatttacctatttgtcctctagcatgagaagctcaaatgaccaggtggtcattatagtatcaacctccctgtattggaggaggaagaagtaatctttctcctcaggaactagtaccattaattgggcaggaatacagacaggaagctcaaaatttgaatgttaggttactagggtgatggtgagatgagccaattctatcattgcccccgggttttcagacatgtgtatcctagctacatagaacacaatagcatatgttggctattgattcagctcatatcctttcttagatcagatccccaatcctgcagggctttgtccccaagatggcaccttagctgagtctttaattcattccaccattctcgtaggcagtctggttcttcatgacagggcacatagtgagactagtggatatagtgttcatatgccctttgttgcaccttctctgccatgaaatgcatcccttggttgaggcaatgctgtacacgttttcatactggtagatcaggtattttataaacccttaaatggtggtgccggtggaggcattgaagtcagagaaggccaaatccaaagtaatcatgaggttttaaatgaattactatttcttacagggtggaaatggtccagtataatcaaactgccaccaaatgactggctgttctctttaaagaaatgtgccttaccaagggtgcagcaatgggctatactgctgaaaggttggtcatttacaggagaagtatcttgattagacttgatgaaaaggagcccaagccattgggtccatgcttggcttccattcctgtcaccatgaccacttcattcatgttcatttctccaaaactggatggcatttataaaatgagtcatctagtctacctgggtgttgagattcaccgcaaaccagagtaatcagtggatactctctgatgagcattaacgtgagacacaaaggtccacagaatttgttcccacccccatagatatagccatatttgtttcctagactttcttgttctctgttttccaatagtattctttctaggccagtggtcaaccaggtaaattacttgctacttcttggtattccatgtatacccttgccacggttctttctcccttcatacaaaaagaatgattgctataatgctcacagatgaactgactgtgaagatttcccttcaccactatcctttagggccacccttgagtggggctgtaatgcagcagtagttcattttttttggctggcattagcttgtgccaatctgtaaagcagacaccaacctatgaactccatcaagtggtcatatggagctctccatgaagccaatttcagtgagagtgcagcagaaataagtgaagtgggagtctaggccacctattcatgaatttaccttccctttctagactttcttgatccagaatgtaaaatttctatcataaaatcaattgctgctgtgctcaccttattttatgtagtagaactggcaatacccaattcacaatgggcagctgtagtcacagagtcacttagtgtcccattgaagagatctcagtctctactagggcagaatagcatgtcaggaattattttcctcataaagggtatttctgtccttcagaaggcagatccttgctccaaaactttaagagcctgagctttcattctcttcttgggacctgctggcgagtccacagaatatccttgtccaggatggatatctgtagtgttgtaagacctgctgggctgggctgtatggcccacatggcagggaagctggcatttcagcctgaatctgttatagactcttgtaggtcctacctgaaactggcagccttctgagttatctgataaatgggaaaatgggttacactgctgccaaaagccaagacgcccagcaagtgctgtacttctttgtaaaaggtagaaagggcaagatacaactgtatgtcctataccttagaagggatttttttgtgagacagggtctcactctgtcacccagactgcagtgcagcagtagttcattttttggctggcattagcttggcttgtggcaacctctgcctccaaggcccaagcaattaccctgcctcagcctcccaagtagctgggattacaggcacatgccactactgcccggctaatttttgtatttttagtagagacgggtggccaggttggtcttgaactcctgacctcaaatgacccacccacctcggcctcccaaagtgctgggattacaagcgtgagccaccatacctggccagaagggattttttagaatgccgcagactaagcatgttgctaatggaagaggtccctgaatctttgtgggatttatctgctgcccccaaccttcagatttcttactagactagctaggcttctttctactttttgcccaccaactctaattagcatatcatcaggtagcagaccagtatgatgatgtgcgtgatgtccagattatccgtccccacaaactcttatgaaatggaaccccttgggcaaagcagtgaattggtattgctattgttcctagataaaggtttactacttttgattctctctattgataggaatcaagaagagaacacattcaccagattgataatcacatataaagtgctacaggctgtgctgatgtgttccagtgaagacatatctggcacagcagctatgatagaacctacctattggttaagtttgttaaagtgcattgtcattcaccttaatctatttgtttggggtttttgttggttttgtttcttacagggggcagataggtgaattgaaaggatatgaagcaccaccattctgcatcctttaagtctttcaagttgacactaatatctgcaatttatccttggacatactcctgtcagtataagctcaaaccttgtatccaatgatcttcaagaagccttggatttctgtttaccagttgacagttactttggcaactggccacaggtcccttttaggaatgattgggggacagtcaccaataatacttgtagtggtatacactttccctacacttccctagggggatccagcaacacttttaatcaatgaattcctggttcctgagacattaaagttttaaaatatgtgcctcttaagatgatgaaatatagtaacttgatgtggttactatacacagtactagagggaagaattttccataacacaaatgtttagatttaaattcatgccttgaagccagataaatgaagtataagctataattacaaaacacctagttcttcagtgtttggatttatgaaaattgccatgattgttatctattgtgagttattaatccaagttacttttattacattttaacagttttagctataacataaattccatgggttttcgtttttgttttttgtactaccttaaaaaaacctatcattgttctgtggggttttttttgctcagttatgtgtttgtatcagctttatgcccagacccatactatatgtcttcacatataatatctcagtgttcacagtggtcttccttgggaggtgtttgactctcatttagatgcaaaactgagacccagaaatgtcatcttttttgacttttatgtcacagctggtaagtgaaagagtcagaattcaaattcatgtctcccaactctaaacccaaagctccttctactattccatagctatcttcctaaatctggtctattttctctccctctccctcccctcctcctctctcagttgatgtgaaattcacacaatataaaattaaccattttcaagtataactaccattcagtggcatttagtacattcacaatagtgtacagccagcacctgtatctagttccaaaatattttcatcatctcaaaggggagctcgtgccgattaagcagtcattccccattccccactcctcccagcccctggaaaccaggaatctgctctccgtccacatgggtctacctattctggatattttgtgtaaatggaatgctaccttatgtgacctttgtatctgactgctttcacttagcataatgctttcaagtttcatctaaattgtagggtgacaaagagtatgggcaatcagacaagtgacccaaagggaaaacagatgtaaacaggcctggctaaagcttgcagcaatttttggacaggttcatttctaacacatcaatgtagatagcagccccattccatgctgtaataccttataccttagatacaaaaatctgaacatcaaaaaaatctgcgtacttggccgggcgcggtggctcacgcctgtaatcccagcactttgggaggccgaggagggcggatcacgaggtcaggagatcgagaccatcctggctaacacagtgaaaccccgtctctactaaaaatacaaaaaattagccgggctaggtggcgggtgcctatagtcccagctactcgggaggctgaggcaggagaatggcgtgaaccccggggggcggagcctgcagtgagccgagatcgcgccactgcactcacgcccgggtgacagcgagacgctgtctcaaaaaaaaaaaaaaaaaaaaaaaaaatctgtgtacttattctcagaggcttagagctaccaaacatactttcccgtgtcgaaaggttttaagagttcccatcttgtgaaggaggctgtttctagccagttggcagaggaacactatgcatttatcccttctggatctcatggcaatcttaggcaacatttctagaaagcggcgacttaatagcaatgcatgaagccattattcataactcttttagagtcaatattcatgcaaagggcttttctctgttataaggaagctgaagaacaattctaacaatatcctatttctatcgatgtttcttataataatattggcttctatgcctttttttaaaatctccattaacaaatttaaccaatgtgccaaggaagaaaatttgctgtgaattggaaaatgtttaaatgagagacataaattattcttcaccttatgtttaccagagcttacttctcagttatttttccccaacctgctttagatgtggaggcagaagaggtgtggtataattcttatctcccaccatcgccctgggtgggagattctatttactcaattcacagggtgaacaaactagtaagatctgtaaaatctgctctccccacaatgagtgattatacggagctcatgagctaatgctggtagcatgatgtaacagaatacgccttgatcacaggttagctattattactaatgcggtggtaggtctgagagcctgtcagatgtggcctgatttaaccctcggtgtgagcattatatcaatttgtggagggcaagcttccatgcagggaccatccagcagctgtttggcatcagggttgcacagctttattaggaagagcaacacttgtctacttttcaaaggggacattttaaagacttccaagagttcttatcttcttccagatatattcattcccagtagggtaaagggactgaaagtctaactagggggtctctgtgccaatagagcacataaatctgtaagaatgatttatctgttctgtgtcagagtttggctgaaaatcctgttagtactgccaaaccctccagatgcccatatttaatgcttggttggccttatgtagcataaccaaattgccatttcacaaccaccctcaatccctggaatctaaaacaacaaagccagaagctctgaaatgtgctttatgaagcatgaaagaatcttttaaggctctgtctgattcatttctgtgtgatgatagaaggtctaatgtacttgtgaaggattccttttactcgtaagaaacttggcactttatagaaagtatgtatttcatgaccaaaaaaatagggtggcttggagggattgtgctttctttttgtattgtatccaatatgttcagtatcaacagcagcaaaataaagaggaaaaatatctggtataaagctatgtcagctaaaagtcacggtgaagagcagaggacagttttccactgaattcagggaaattattgcatgactatgtgaaaggactacttacacagtaagagtgctaagtagaaatggacagtggaagtcaggagaccttccataagtcctaagaatcttagcaaggcacataatcattctgtgtcttaccttttgtatctattaaaggaaaaccataagatggtcatgtcctatttcagagaactgttaggaagaccaaggacatcattgttcaaatgttcatggagctcttcctattcagggacaatcttccccattcagcagagtaagactatggcaggttattgtttgtcacatattttgaagaacacaaatgtattatacagggattctgaaagaacttgactattaaaacaaagcaacacaaatgaagtatttcatttaaaagaatctacacccatccttttcttctccacttttgtagcaatacaaaatgagtccctccacctacatccatgttcttttggtttcctcaccctattttgactttttcctccctctcctactctctcagatgcttttcacagctatctaaacacactcaagtatctttcctctaaaaaaatttcactccaatacgttctcacatttgcgtccacctaccactccttccctgcctctatccttcccttcacagctaaatgttcataaggagctttctcatgttgctcttctgatttttttactccccattcaccatttagcttggtgcaatctggcttttgcccccattacttaattgaaaaaggtcttgccaaagtcatattaacaacctttgttgcaaaatccaaaggacattttagattctttcctaagttgaatgctcagtagcttttgtcactgctgactgcttcccttggttttctccacatcatactccttgattgcctggtgccttacttcaggtcttctgagcagcacaggaggcagggctgctgttgcataatggggaggatactgagctggttaggtgtgccaactgcactccttgcagcttaacagcaaatgcattttttttttttttgagatggagtctcactctgttgcccaggctggagtgcagtggcacaatcttggctcactgcaagctccgcctcccgggttcacaccattctcctgcctcagcctcccgagtagctgggactacaggcacccgcaaccacgcccggctaattttttgtatttttactagagacggggtttcaccgtgttagccaggatggtctccatctcctgacctcgtgatccgcccgcctcggcctcccaaagtgctgggattacaggcgtgagcaagtacattcttaaacgaagccctcacttccacaacagccacagcccaccccttgcaagatacagatctggttctccacatacctttggggaacaggttatccaggattccagtgggcctgtcttcctgaggagaagcttgaaagaggtaacttagggagtagtctgacccctgttgcagcggttggtctgtctgggatcacaattggtacttatcatctctcttccactgttcattttaaattccccctcagctttcacctctgctggtcttgatgacttatctgctgatatgatcaaagccttcatttttgagggcctgaacccatagttaccatacttttcttaggctggggttattgcacttgtttgtctatagtcacaattgagcaagtatgtccaactggatcatctgagttccaaatatatttctccctgtcctcattgtgtaacagcagccctgcttcttcctcctgatcagggtcagttactcctaacaagatattgacttcttcagcctgctggtctctgtatacaagaagtcctgaatgcccaagtggcagtcatagcctgagttctccacagagcctagtattataggaagaggaaacacagactctttcagcgaatcattgaatgtgataagtggactctctcctgcttctgcccaatggttcccagaccaatatattcttcctaattgggataacatccatatagaggtttgtgatgcagtgtctagcctgcatgatgataccccaccatggcagatgccatgatgtaggcaattgcctacaaattggcattccggttgtgcctttggtaggctcttgcattgctctatagagctaccttctctggattatgtgatatgtgataaaaccagaggatcccatggtcacaggctcattcgtctcctcctctgtgaagtgtgtctctcatggtcggatgctgtgttatatggaattctatgtctgtggatcactttcaaatcctccagctagtagtgctgcctgggactttgtaggtaagaaaggcaaacagttatctagaataaatgtttactaccatgacaataattcacaggtccttccaggaagaaatggctcaatgtgtcataaagtggccatgtgatccctgttgtactgctcaggtttgatccctggtataccactttccactagacaaattgctgctgagtctgcctgacattctgacttaatgtattctacagagctcagctcacaaggggcagtttagaatgcatagttactggcttccatggtcaaatattcagtctcaaacagggctcagtagcaccccaagagatgtttttctgcactgcagatggtgtggactcactctagaaatccagagtactgtattttgattcttctatgaaggcttgccacaaactccacaccaaactacctcttttttcacttttcactcttccaacacaatagagtctatgagatcatatggcccaagaggcagggctgcttgtaccacagcctggtgctgcaaagtcctgctcaggccctattccaagttgccagacttacatgttaactgatacatgggcgaagcaatctttctacagtattcaattcaatgaataaatcacagcttatttgtccattttcttagatataaacaaaagtataactcttaactgtaagttctgagtttagtcttcagctctttctaatatccccttgcaccagatataggccttctcatacagtgttcaattgcttgtcagttgctgtcaactttatctcagcattagctggctgtagtagcttcaaacttaacaaaaatccagctaattccttcatccttgtattcattgctttccttcatcttccttgcctcctcctcaacaacatccctccaacacacacacacacacacacacacacacacacacacatgcatgtgcacttttctaaagcatgaacattgcacaggccaggaaagttctctcacggaactttcttccaagccatcattgattaaagtttttagtaattgggctgccaccctgtgccagagactatctgtgccccctgtgccacccagaatgggatcctcatcaccagcttgcaggaagtgatctgctcccaaaacctcattttacctcctgctttctcagaccaattccagtaccaactgtatcagttcagttattctgggaagcagatgctgagacagcgttaggagtgcaagtggttcattgaaagataacatctgtgaaagataaagggggagagccccagactgtgctacagagctgacaaaatcttggccaaaccaatggggagctctagagcaaagactgcctgttagagggacccacattaggcatagaagccaggctctagcaccactgccatgctcagccctgggctgtgggcttcccgggaagagtagagccttggttaaaacactgtgacagttcctgcaggtgctgcagatggaggctggcagctaactgcctcctgacagttacacagaaagctgtttcctggagggagatctgagtggtgcatctctgtggctgccatacccattttctctttcatcttctctgtttgcacatctgcctttctgtaccagcttctctttcttcctctacctatcatttaaatgatgctggatggttttgaggttcttatctcatgccacacttctccagcctcgcctactcccattcatacatctaatgagattctaatgaatttgaatttcagatctgtaagccaggtctcttttctgagcactaaacttatttcatccaattgctcactaaaatatcatacagtgtccttatatttaacatttccaaaggtgacattattatcttcttggccaaaactatctgtatacccatctcagtgaatggatccatcggttacccggatgctcaaaacagcatagtcatctgcaacaacatggatgaacctggaggatatcatgttaagtgaaattggccagacacagaaagacaagtggtgcatgatctcatgcatatgtggagtctaacaacattgatctcgtagaagcatcatgcatatgtggagtctaacatcatgcatatgtggagtctaatgacattgatctcatagaagcagagagtaggatagtggttaccaaaggctgtgcagagggtagggggaggaagaaatgaggagaggttggtcaacaggtataaagttacagttaggtaggaggaataaattctgatgttctattgcacagtagggtgactatgttaacaataatgtattgtttatttccaaatagctagaagagatgatgttgaatgttctcaccacaaagaaatgataaatgtttgaggtgatggatttgcaaattactctgatttgatcattatacaatgtatacatgtatcaaaacagcataccgtattccaaaaatatgtgctaattaaaaataagagaaaactaaaaacataaaatcagtatttaaagacaaagaaaaacagacacataggattattcttgatactttcttctcactcatccctaatatcaaatccattattaattattactagtctaaatatatcttgaatctgtctccatttcatttgttttcatctgagttctcaccactaacatttttttccacctgaatggaaatggagtttcttttgttcttgctaaacacagcagtgagggtgatcagcctgtactgcggatggggtctcggtctcttgagtaaaatacgctattggcttccattgctcttcagaaaatttcagactcttcacatggtttatgaagtccccgtgatctggccctgcttgcttctctttgcaggcagatcttttactagtttccctccactttagtcacttctattatttcagccactttgaactatttttatattctagaattttatttcagccacttcgaactatttttacatcctagaatgtgtcattcactctgctgctcttattgcttgcacaagctattcatttttgtgggaacattctttatttccactcttttttttctataattaacccttttccatctttaatgcatatgaaagcacaaaaatagcaacacagataactatgtgctaccatcaaaattaaccagaagttaacaattggctttaacttaggtttctcttttattttttaaataaataaaatgttacagcaacaactaaagctctgccactatccactttttccttctctccccacgcagggattaagatagaattttactgttattgtaccctctcttgctgttaagaaatctgccaccagctcagttatccttctcttgatgttttcatctttgacttttatttgcttttaagatctctttgtctttaatgtttaacagttttcctgtaatatgtgtagatattgatgaatttttatttaccctgctttgaattcattgttctattttgaatgagaagttcttagccattatctctttaatattgtctgtcctcattttctctattcttttctcatgtgagtcctattagatgtaagttggatcatccatctttcattcttgccttttaacttctcttttgtgttttctaatatgatatctctctgtgctacattttatctggtttcttagctttacatatatttccaggccactattcttcagctaactactcttctgtctaatccatttctgttatatttcggttgtctgttctgtttcatatatctgttcatttttgtggttttgatcatgtcttttatgtcctgaattagtttttaaaaaaacttattttataatcactttgaaatcattctattctctgtaattcttgggggtgtcagtttgaaaactgtgagatcttaatggctctttcatggtgaattgttacctttttattttataatttaggattataaactcatttatcattgagaaaatggctcaaggggagttccacaattgtttccaacagcaacatcagggatttcactgctcagggatatattttatgatactatctcagcttgggaggtgtctcagccatccagtagtttaaatgccaaccaaaacacacaagtttatgggcaagggcatggttccagattctcaagaaggtttttttaaaaatagaatattgagtttgatgcagtggcgtcaggagcaggacgactctttgccattcagatcatggggaaagcagtgggaatccaagtgaggagcagccagaggacaacagaggagaggatgggaggctgatgacctgggccctgggcgtgtggaggctgtgactcttctctagctagaggactcttcttttgtgggaaggatagcatcttctgaggacccttgctatgtgagcaggctgacataggtggtgatgaggtctgttcctttctaggttcctgtagagatctgtaggtagctgttcactagggagttaactaagaaagagaacaaaaactattcatttggatccaaggtccatcaccgctggtagctgtggtggctttggattgtcggacgaccatcagcttcagcaggtctgcactagggaacaatcattcttccctagcccaagcgtgcctctgccctctgtatcgttgacagaggctgcatgtttggcaagagaacatagtgactgctgaactgaaagttgactctaactctcgctaccaagtttttccctgacacagtgaaagagtattaagacatcagcctaggacaccttgagaaccaaggacaagatggacagggccaagtaactgggcttcaaccatgactgggactaagaataagacaagaggccaggccaaagcggaaaagagtctgctatacaagctaaagctggagaagagagggaggctacgggtgtggttaggcctgtagccaatacctgggccaaagcaaaagacaagccagggtctctgacagatgcagtggcagagatgaaggcagtgtctaagaacaaggtcggtgctgagatgaaggaaggagcccctgtcagagcctaaggctctgggcaaagccactggagatttcagtcccgaggctgggaatgagtccaccagctccacatgtaaaaatggggctggtattgatgcctgggtctgggctgaggaagaggccactatcaattcctggttctgaaatggagaagaggctggtaatcattccggtgctaagaatgataaacctgaaattggtgcccaggtctgtgctgaggagttggagcctgtgactggggccagttgcaaacctaggtctggggctgaggaagaggaggaagagaatgtcattgggaactggttttgggaaggagatgatgctagttttgaccctaatcctcaatctgtgagtaggatagttagatctcagcctgtggatgaaattaatggaaaaaaaaaataggcccaaggactggtctgaggtaactatctggcccaaagcccctgctgtaactccagcagtattcggattagatcccaggcatctaaggcaagccctccttcatatattgttttggcctcagctgaagaaaatgcctattctttgcctgtggcaacagcctgcccttgtaggaacactaactcatgctcacagcccatccctgagtgtccttttggttccgacccttgcatccagaccatagatgagattagacaccaaatcaggattagggaggtaaatgggattaagccatttgcttactcttgcaaaatggaatgctatgtggactctgaggaatttgaacaacttgttaacttacttaagtcaactactgatcctcttgttcataaaagagcacagattgcaatgggtatccataacgttcacccatttgcccaagagtttattaatgaaatggtataatgatgcttattgaaagcttgctcagttttccttccccagaaatgagaaaattactaattttcttatgagtaattactctgaatcctccttctggggatgaaagacaatgcaaaattgaattacatgttaagcatatgtgtaaagacaccatgtcatttcctttgaactcacctggacagcaatctggatcaaagatactagggcaactgactactgattttgtccatcactacattgttgccggtgacttttcagagctttttcatttgccatccttgagaaagtacaaaaccagacatcttgttttgaaagtaattttaaatatatctgaaaatccaactgcagccagagacatgatcaatatgaaggcactggcagcatcaaaactcatctttaaccataaagaggcaaaagccagtcttgttagtggtgtggccatatttattaacataaaggagcatatcagaaagggctcaattgtagttgttgatcacttgagttataatacactcatgggcattctcagggaagttaaagggattattgaagcaatgtaaaatgagccagagatagaacactttgaaccatctccaaactctagcaggctgtacattcccaaagagccttgtatcatatttggttattatggtgtacaagttatacattgcatctttaacacatagttacctgtgacaagctctaggtttgagctaaactattttgggggtatcagatgaatatcatatcactggctgaaaatgtttgttgatttttttcttgtttagattggcatattttttacattttatttaagaaagcgaacgagttcgttgtaagtgagctaacttgttcattagtatctccttagatccatctgtggcttaaaatggcaaaaaagaaaacatccttgaatttgaaatctagttatagaagtaaggcatacacacacacaaagataactaacagtacctagagagagagtgagtgtgtgtgtgtgtgagtgtgcacgtgtatacccatgaccaaatgtgcactctctacataaaggaggcaggggttgctataggctgtttaatgtaagagaaactactctttttctcctattccagccgtatcagatactcattccacaacacagaaagatccagaatttcagacaaatgcattatttgttcaattttaattttgcttctacatttataactcttaaattgtcaggctgtttcatttatgtcaaagtcatctcacaaaagagaaggtggaaacattttgtgagtgcctattctatgtcagacactaagttggcaccatattttgcaagtttatttttttcctgtactcacagtgatcctgtaaactaggtactcgtgtttttattagaactcattagtctgggtaccctccaatgagaattagagagggtaagtactttttcctagattcccacagcaggcaggtggcatagctgttttatctgacaccagaacccatctcaccatactcctttacagttcccctgaaggacattttgaggcgacggccttcaaagctcagagactggttttaatgtttaattttgcatgccaggttacaattcttaacttcctccacatgcatgtgtccatcagacatttgactgcatctggctggaggtcagctgaaaagtctgagatgagtagatggattttatctggcagtgtcagaaaaatagtaggtgccccaaactttgttcagtgagtaagatggagatttggagtcatcagcaaggggaacttgttagatgtcctttgcatctttttctacccatttgtactttatcttccccaaagagctgaaatcatcctgtacattgttttatatcctgaattaaaaaggtaattgcttttggccgggcgcggtggctcaagcctgtaatcctagcactttgggaagccgaggcgggtggatcacgaggtcaggagatcgagaccatcctggctaacatggtgaaaccccgtctctactaaaaatacaaaaaattagccgggtgtggtggcgggcgcctgtagtcccagctactcaggaggctgaggcaggagaatggcgtgaacccgggaggcggagcttgcagtgggcggagatcgcgccactgcactccagcctgggcgacagagcgagactccgtctcaaaaaacaaaccaaaaagaaaaaggtaattgcttttttcctccttgcaaaatcatgccttaattttttttatcatttgtgatttattctcctatgtgtcctatgaaaggccaaagggctttatcttttactagtaggcaagcctgggcatttctgcatttgtaccggctaacacgacagaataaatgtaatcggagaaatttagatccagaattgcagcttcaacaatacaaaacagcaaagctacaagaggctgctgtgccaatctacaagacagtgattcttagtcgttggtatggaccagaaagcatgcccaggacgtttaggttatggctgaattctctaagactcatggtgggaattgtaatccctagtctgagctgaaacggaagtttctatgtgtgaaaatatggggtaatatgctttgaggttttctgacagttaagaaactaagacaagatcatactgtaaatatgtatggaacttgcttccccccagttgtgtattgtaaacatctttgcatgtcaataaatatgcctctataacaacaacaacaacaaaatagaatatatacaaggggtatgcaaactttggtcagtgggaagatctttgctgactcacattttcattaagtgtatagcactttgacatccctcattttgtagcaatatcttaattccaactcttcctgtcacatgtgctgacatctcttcttacctcgtgtcagcattaaaatccaaactctcagcatcctgaggctggcgattccttccccatgatcatctttctacttcttgagcattcacagagcttgttactctgttttcagttctttcataatatctggggagttcctggatttctagagagttcaggtattcatttgaaataattgttatgttttatctaacatttatcagtggtcatagtgggaaggtttggggattatgtagacttccaggaagtcttcatctttcagttcctagattattcattgcccagatatttattgtcttggggactatattgggtattgaagagagctggtaaaaaatacagatagagagagatagatagagatagagatagatcctacactattaactttacaataaaattagacatcagtttctccaggaggctttctctaacttttctcaaatctcaaaattagctattatacgtagctaactcactgtatatttcctcattctgtcattcttttttttgtttgttttttgtttgtttgttttttgagacagagtttcgctcttgttgcctaggctggagtgtaatggcgcagtctcggctcactgtaacctctccctcctgggtccaggcgattctcctgtctcagccttccaagtagctgagattacaggcgcccaccaccacttcctgctaatttttgtatttttagtagagatggggtttcatcgtgttggccaggctggtctcaaacgcttgacctcaggtgatctgcccgccttggcgtcccaaagtgctgggattacaggcgtgagccactgctcccggcctcattctatcattctatcacactattttaattatatattaatttgtctgtatcatcttcaagattataagttctgagaaaatggtaaagcatgtccttctgattcgttattccacagtgtcttgcacaaagtccaccacattgcagaaacaagattattattgctgaacacagttgcttcagaaagtacttgagaattttcagtatcttttaagaaaattcaattggcctgtttttcccaacattcatgcactatcgacccttcctttttcttaagtttgttcttctctgtatgtaaattatctcaagcctcctgtatccttaaaaacaaagaaaaaaaggaaacagtaataccttccctagtttcctggatctaaggattgtattctgtatctccttctgtcaaatattacacagtttaccattcctgcatttataagctcttttaaaagccagccaaagcaatcctggtgcttcccagatgccagttccacaggaatattggtcccccatgaggcaatttgctaaagcactctggctctttcctgatgtctgcacttatgactcatggctgatttgattacttcccggtgactccctgaatcctttgcttgtttctatacttcaacgctagttcaattttcttacattaattatgttttaagcattaattatgttttaggcttgattcaagtcttatgctgcatcccacactttttaaaaaattaaaaaacaaaacatttttattgcatcccatgcttttaattgacagctcaattcacctgggatttctccatcaggtcacgcagctctgaaagctctctattgcccccttctggtagctggcagactagctcctcaattagcttacatcgtcaatgctaaccttgttgcttgatgttgctatgcctcagatactagtatcttcctttctttcctatattcttcactgccgctgtttcttcatcatctatttattcctcattcctttcagactgacttctgctgcctccagccttctaccaaaacttgccatcccattgatacaaggccctctcaagtcttctggatgatctctgtatatgaaaatattgcccttccctttcctacttcgccccaacactttattctaagaacttgaaattctattagaaattatctactctaggagtcttcaaatttgacaacagattaaaattgccaggacaacttaaaaatactgtttcctgggcccccttcctgaaaattctcaccttttaggtctgaagtagaggtctcttttgacctattgtcatcattaaaatcccaactcccatttgaactttaatttaaatgtatttattcagttaggtaaatcatgcattgggtaaaaatttaaacaatacttaaatccacccttcctgtataagtgttcttacaagctatagagaaatacctgagactgggtaattgataaagaaaagaggtgtatttggcacagagttatgcaacctgtacaggaagcatgatgctggcatctacttggcttctggggaagcctcaggaaacttacaattatggcagaaggtgaaggggaagtaggtgtggaggaagggggtggggaagtgccacacacttttaaatgaccagatctcatgagagctcactcactatcatgagaacagcacggcaggggagatctacccaccatgatctaatcacctcccaccaggccccacctccaacattgaggattacaatttgacctgagatttggacagggacacagatccaaaccatatcacttccccttagtttccttacatttcctctcctaaggcaatccttgttaacagtttcttaaggatccatgtaggcacaaattccatattctaaagacatgtctcaactgatttggatgcatttggtccactaagcttgaggagcctctgatttaattcacccctctcatcttccttgaaattctttcatccttcaacatcctttatgctgattgtcgaacatctctgatagtttgattctgtcttcttggtccacacctcctactttttctgactgtttaatgtgggcattcccccaaactactccccttgatcttcttttctgtctatattttctttcttgacacatctctccagacctatgagtcactcacagaatatactcatatcacttgcgccaacatctcaagctagccacacaccagtattttttctaccagttagacatttctgtctagttgtctgggagcacctcaaattcagcacccaaaatgaacttacctttctgttaacaaaactacttatgcttctcttttccccattgtccttacttctgttatcattgactcttcctctgcctcttttatgttaattgcaccttgaaatgacccacacttcttttccctccacttcagtttcgtttgttacagcattttttacactagcttcacttgtggttaccacttccctgcccactgctcataagccccttgaggattcttcagggcagcaactatattttctttatttctatgttctcggcacctcactcattctctcatagtaggtgttccatggatatgttgggtcaatgaatatccgttaaagctcaaatttttaacatggcagtcgacatcttccatttctgatttaccaacctctttaatttagataacttaatttacgccttgccacaaccaaactgaactattcacagctctcctgaatgcacattgcaatcttccttttgcacttctttgtttatgcttttctttctgcttgaaattcccatctgttccctgcctatcaaaatcctacaaatccttcaagtctcagatcaaatgccttattcttcccaaagccttcccaaatccttaagtcctgggttcccacagcgtgtggattgcattttagtctcacttctattcgactaaatttataaaatcatcggattttagttgtggaagacactttagaggtttggattttagttgtggaagacactttagaggttacctaagacaaccctgtattttacagctaagggaactgagacccagaaagagtaaatgtcttgctcaagattaaatatcagccagcgaccaacggagccagacctagaacccaactctcctgaattgttttccagagctatgctgcctatgcaattgttttagcttctcttccggaccattagtgccaaaagtcaaggattaaattttattcagctttaattccttataatatccaatatagcacctttcatatagtaggttcacaaaagctatactggattgaaatgaacatttaacgtactggttaatagatatttttagccagagttccctggaaaacagagtgtgaggcagagattacttgctgatgtgagagtaaggagaaagaaaaggcaggaagggctaagggacaatgcagtgactactgcttcccagcgaacctggaaacccagcagggaatgtggcaagtggtctgtacatccaagcaaggtatctgtggccaggctgtatggacctatgccttggggcagctcataataagcaacttactgtccccatatcgtctcatatcttttttcccaccgatcaaagttactcccctgcacttccagttctgtcatctggcccctttgatggctctttggaaagccagattccatgccctgcgggaaggttcctcggttgagtccagagtggaagaggatgcaaataagatatgtccaataaaaaaagctttgaacctacacctgttacttaaccctgttacttgagattgttcctattttggtttttgaaatccattgatgttggaaacacaaaactggtgatggctttctttaagagacaggctgaaacagaattttttttttttacacggagtttcgctcttgttgcccaggctggagcgcaatggcacagtctcggcttaccgcaacctccgcctcctgggttcaagcgattctcctgcctcagccttcccagtagctgggattacaggtgcccaccaccactcctggctaatttttatatcgttagtagagacggggtttcaccatgttggccaggctggtctcgaactcctgacctcaggtgatccacccacctcggcctcacaaaatgctgagattacaggcatgagccactgcgcctggctgaaacagataatttttaaatgttttgtgcaagttaacagtgacattcatgaagagaatgattaaagtacagcttgaataagttctgatttttctctcttaagaattatgtgcaaatccatatgtgacttttaaaaatcatcagatttcaatgttttctcatatgatgttatgattctacattaaaagaactataaactcttctaattaaattactcaagatagtgcaaaagaatccatgactctttgtcctcagatataactcgtaccctaaatgcaagttgtttaccagtgcacatgacaaaaaacacctaagtagggggaagaattctttctttcagacaagtggttttacctacttaaaaaaaagccttgaaaacttggacacccttcaagagcctctgaatatttttcttcagcagaaattccagcccagatgttcaataactcaggtttgttttaaaagaggaaatagagagacaaatttttgtgaagggcaaaatttgaaagcaattaatggtgacatgtcccagaattttgcttcattttattattaacgcaaccattctttccaaattttattgtcagatattggagaagagagaggaaaaaagtctgggaattggagataaaattcaacattgaaggagacattttaaatcccagtcaagaggaaagaaagagttgatggctaagctgactgccaaaagacattgtaaagttaccagataacaacaagtgataatagaagggcctagggaagttctgctcatagacttcaaacttggaaaggtgtcctgcagaccaaaacctgctgacctagcagtggcaaagttgccttaaatgaattcacaccgacaagcctggagggattgtctcttgatgctaaagtgattcggtcatacatatctgagggcactaggtgaaatttctggagaatcttggaaaataagtgtgggaccagaaagatagaatcactttgttctggtttactttaaaaggataaaaggtgcttttcatttgctggatcacttaaatgctctaagtctctggttctcctataaactggggactatttactagccccatttatttaccagaattgttttgataatttaaaaaaaagatatgcaagctaatcataaattctaaatcaatataaaaatgggctgggcgtggtggctcacgcctgtaatcccagcactttgggaggccgaggcgggcagatcacgaggtcaagagatcaaaaccatcctggccaacatggtgaaaccctgtctctactaaaaatacaaaaattagctgggcatggtggcacatgccagtagtcctagctacttgggaggctgagtcaggagaatcccttgaacccaggaggcagaggttgcagtgagtcgagatcatgccactgcacagagagactggcgacagagagactctatctcaaaaaaaaaaaaaaaaaaaataagctagtgagtgactatttaagtctccttcttctttccattttcattgcactttacacatactactgttgtagatcttactgtgttgcatgatggagaggtttatgtccagtttcccaactggaatgtgagatactcaagaggacagacgtcaacttatttttcatatgacccccccaaacccaaaacaaggattagcatttaatgagtgcttaacaaatgcttgctgaatgcagcaagattaaaaaataatctcagcagactgtgctgcaaaacagaattgcaagatgataacctaactaagataaatataaaccctacatttgactctaaataataaattgcacaattattggattgtaaagtcctagtccagaggtcatggtaaaaacatctgggagctgcagttaactataaaaacaggaaagagaccgatgaagcttctaaaaatattaacttattaatactagcatagaatcatgggaaatgatgggaaccaagagaaatgatagtctcactgcgttccttgtgggtcgaatcacattttaagaggaattgataaactagagtaaattcaggtgactccatctaataggatagacagtaccccatgctataccaaaacgagttaaaagagctcaagtagggctctggggaagagaaaaataaaatatagatttgagctgtcttcagttatttgaaggagatccagtgttgtcccagtaggcaaaacttagaccaaaaaaattgtactcccaaatttgattatcacatatcagatttggattcagtaagaagaactgttctaaagatcacagctgttcaacaatggaatggactcctctggacggtagagagattgtgtcacacaatacctggggcttagacatttcttgtaatcctgtctgtacttagcatagctctggacacacaatccatagtcactaaatattttttcacagattgatactagggaaaataataatatttaactatgagtatatgcctactctgcccagtaatgtttagtattgaaccagagatctagattagtgatctccagatttaattcattatatactcctatcagtaaagtttttgaacaggtactcctaatatatacatttatttataaattctatactatactactctactaatcgtcatatcaaatacatgtttataaaacaaaaataatgtaagggcaaaaatatgagataaagaaaaataaatgttaatgtgttttctttctgcacaccaatggatcatcatggccaccccactttgcagagaactggtctataattaagggacttaacatctgcctcaaatacctggatattttaggcccttctgagtctgaatgatctacatatcaatcttaattttttcatttctcttttcccatgtagacaaaaacaggattaaaaaaaaaaaggttaagcgatgttctaccatttctatacagttgacccttgagcaacacaagtttgaacttcacaggtccacttatatgaggattttttttcaataaaagtaacactgagtatgctgcctcttctgcatccccttgcacatcctccatctcttccatctctgacacagtgagacagcaagaccaacccctcctcttccttttcctccttcttcaacatgaagataacaaggatggggacctttatgatgagtcacttccacttaatgaatagtaaatatagtttctcttccttatgattttcttaataacgttttctttttttttctagcttactttattgtaaaagtacagtttgcaatatatatgcaaaaaaagtcttcactgactgtttatgttatcagtaaggtctctagtcagcagtaggctattagtaatcattttaaaaagccacttatagattcaatgctattcccattaaactacctttgacattcttcacagaactagtgaaaaaaaaaactatttaaaaatttatatgaaaccatagaagagaccaaatagccaaggcaatcctaagcaaaaagaacaaagctggaagcatcacgctacccaacttcaaactatactacagggttacagtaaccaaaacagcctgatactcgtacaagaaccaacacatagaccaatggaacagaataaagaacctagaaataagaccacacacatacaactatttgatctttgacaaaccaagcaaaagcaagcaatgaagaaaggattccctgttcaataaatggtgctgagatatctggctagccatatgcagaagattgaaactgaaccctctccttacaccatatacaaaaattaactcaagatggattaaagacttaaatgtaaaacccaaaactgtaaaaaccttggaagacaacctagccagtaccattcaggacgtaggcacgggcaaagatttcatgacaaacatgccaaaagcaattgcaacaaaagagaaaattgacaaatagaatctaattaaactaatgtgcttcaatttactttgttgagagtataaaaaacactatcaacagagtaaacaggcaacctacagaatgggagaaaaaattcgcaaactatgcatctgacaaagatctaatatccagcatatataatggacttaaatttacaaagaaaaaataaataaccccattaaaaggtgggcaaaggacacgaagacatacatgtggccaaaaatcacatgaaaaaaggtgccatatcactgattattggagaaatgcaaatcaaaaccacaatgaggtaccatctcatgccagtcagaatggctattaaaagttaaaagaaatgcttttaccctgttgggagtgtaaattaatgcagccattgtggaagacaacgtggtgattcctcaaagacctaaagacagaaataccattcaacccagcaatcccattactggatatatacccacaggaatataaataattctattataaagacacatgtgtatgtttatttcagcactattcagaatagcaaagacatggagtcaacctaaatgtccatcagtgatagactggattaggaaaatgtggtacatatacactatggaatactatgcagccataaaaaagaatgagatcatgttctttgcagggacatggatggagctggaggtcattatcctcagcaaaccaacacaggaacagaaaatcaaatcccatatattctcacttataagtgggagttaaattatgagaacacatgggtgcatagagggaacagtacacattggggcattttagaggctgggggatgggaggagggagaggattaggaaaaacgactaatgggtactaggcttcatacctgggtgatgaaataatctgtacaacaaactcccatgacacaagtttacctgtgtaacaaacctgcacttgtacccctgaacttaaaataaaagttaaaaaaaaaaaaaagaataaagggtagcaaacacaccttcttgctacaaaagaaaaaaacagtaggctattggtagttaagttttggggtagtcaaaagttatgtgcaaatttttgattatgccattgtcgacactcctaaacccctccattgtcaagggtgaactgtatctgtttttgtaagtcttttatgaaaatatttttaaatgtcagttttttgttgaccctgcatgattgtgatagaatttttctacctcgtgtctccaaaacagatgttgttcccttataattataatacattttacaaaatcgcaactgcagagtgttttgttgaagtgatcatcttaaatgaatgcatgagccgtaaccggatcaatcattcttactcctgtcaagctttcaattacattccagagtcccagcacaaacctagcagcttgttggaacatctagatgccctttgcttctacatcctccctctttcctcccagatttggattacctttaaatgagctattatctgatatgatgccacagtttccatgattcgtattcatttttttaaaactttcgtctatgatctagtaagtgacgatgactggtttattgcaaaattttctgaatcactttgctctgtcagattaagctttcagctaaccagcagagggagcacaaagagacacactggtttcatctcagtgtacagggagtctagttactaagtggacgaagaactcccgcacattgagatctggtcctcaactggcaagaagcactgttcgagcaatcaggaaaatctgggctttaagcagtggcaccactacgaatttattctcttgcctaagattacttggaattcctatagtagtgggggaggggggactctcttttgtactagttcctccttaaattttaaagaaattgagcccgtggactgaggtgggtgcggatggtgggatgcagaggaaacaaaaatttcttctcatctagcttccactccaaatctgtttctcccagagaaaatacaagacttaggagtgctgtatgaagtctcttgctgctctattctctaggaaacctaatatgaaatcattaagctactgaatgtcagtttcttcaacagtaaagaagacacattattattgctgttattattactactactactaccaccaccaccactaccaccattactatccatttagtgacttctgttttctctacttaatctcacttattcagcatatcagccctaagaggcagattttattgctcccattttacagaagaggaactggaggcttaaagaagttgaagaactcaaccaacgtcaagcaactagaaaggaaactggaagaaggtgtctctgattccaaagctccatgcttttcatctgtgttggtaataaaaagaataataccatatcacagttatattgtacattacaaagcactttaacctttatcatccccacctcgggataattctgtgagctaaacacggacaaatagtaacattcacccctccctatctctctttacctctttagctcctatttttaaaaaacaagcaattaagggaactaaagcttacaaaatgtaaaggatttttctaaggtcacatagatgaaaaatggatttgggattaaatgggttttattcctgtagttgccacatcacactgctttgccacatagagaggaagagacccagctttgcctccaactagctcttttaccctaaaatgatcatttaaaccctggagttcttgcatatataaaatagatgggagtaacaataataattaatacttatgttaacaacctcacggtattcacaaagatcaaatgaaatacggagatagttatgaaataagtaaataatatacagacaaatatagttctattgtaagattatcctgggtgttgaaactaggttatgtctgacttctggcaaaattacaggacagggcaggttagtgtctaatctgcctacttcccaatccccaggtagctgtcgcctgaaaaggcatcggaagatacttaagagataggagattgttcatatttacttaattttttggatgagactgtttgtctgaactgtctcatgagatggtatttacctacttgggaagctcattctctcatttgggacttggaagcattctcattgtacaacagtgagagctggaatgccattacatcattatgaaccacccagtgcccatttgatatagttaataacaaggattaatgaagtaatttaaaaggaagaaatagaatccttgccttgatccaagacaaaaggacaaaaaaaatttctttctgaaatttgagggaaaaaatattggttgcttctattcttttaagaaactgcctgagaaaagtcacagtgtgtgtgttatgtgggaaataagagtattggggcaggcaatcattcatatgttagatttctttgttcagatcaatattgtttgagtgctaacactgtggtaggtgctggaaatcgaatgctgaacagaacagataagttgcccacactttcatggaatttgcattttagacagacagccagcaatgatcaaataattacatgtttggtgggtgttacaaaggagaaaaacagacttccattatgacctcttatgtaatcacactgcaatatcttgaaattattacttataaagatcaagcagaagctactgctgcatactagagaattttaaatgatttccaacatcgagaaacttgaatttcttaaggagtagttattataaaaagaaactggaatggctaatcttggctgtctctctaaagccaatataaagaaaatgagtgatacacaacattatcttgacctcactgacaactagatagcctaagaaacagtgtgtgcaatagagtagaaggaagaatcaaaggacatattttataaggataatgagttctgctttcttttcctcttctgggctataataatttttgtctcttttgtaatcataccctcttggaaagccactggcttggactgatttatgcctactacagatttttccttccaaaagtacatctccatgactaaggaaatgggctgtctcaggttggctggttccatcaagaacacttaaaacttgattgcacaattgtaaaaccaactggggtcttagcatcaacttgcattttctcattggcatccaattttgaggatatcatattgcttggagaagaaagaggcagtagttattataatttccgtggacttacagagttttagagacttggatatcgtgtactttaacctcacacccagtgtaagaatctcctatacctgattcatgatattcatcttttgaatacatagggtaaaaagagcttactatctcatttttgaagaattctgttattcttttttatattggagaaaatctaccaccattagtcttagatatgttcaccagagccatcatggaccaaatcagaagtaatcatttctacttaaagactttcctcctcttcaccactaacaagtcttttctcttctaggctaaacattccaggtttttcctccattctgtataccacatgatcctccaaattgctcccattttggatgatggagcttgaggaggtggaagatcaaaatgttagtgtgtgttatctaacagatttgctctttctctcagttttgtaacattagcaggtttgatcaatatttcacctgtgctgcaattcacatcgataattaaactatacagggttgctttaattataaagctaaaagtggatttttttccattaacattaccagataggatgatttgccaactcgttctctgggtctagaaaatgcccaatgaagtcatattgactctaaaatcaagctctggatgtgaagatgctgccatgctgttgagtcaaaagaatatattatttttcatttctgttagaccagtaattttagtaactttggcaaaaggaatataaaaacaagcaatctccaatttatagggctgcactgtagaagtcatttgtttggaatgtatttcacatgagtattaaatttttggggaagactaccaaattttttttcttttttttcttttttttttttttgagacagactcttgctctgtcacccaggctggagtgcagtggcatgatcttggctcactgcaacttccacctcctgggttcaagcgattctccagcctcagactcccgagtagctgggactacaggcgcatgccaccacacctggctaattttttgtattttagtagagacagggtttcaccatgttgcccaggctggtctcgaactcctgagctcaggcaatccgcccgccttggcctctcaaagtgctgggattacaggcgtgagccaccgcacccggccaaaatttttaactcctaagacaactgacattgtaaaccagaatgtcatttccggttctttaacttaacatgtaccataagcaccacgagaaatattttgacatctagcacgatgtttaacaatgtttttctggattcggatgaccaggatcactgctgggaacaccaggaatattttcatgcttttattctctatccaattgagttaaggatccccggccccacatctgctgaataaagaaaactgggatccttgtggcctgaatctggtggtggctgggaaggttaagatgcagtgatagatgctacagagcttctggaataaagcctgcctaccactggggtatactcctcagtcttcatgggtcgcagtcagactcccattctctctttccctccacgtcagcctgattcatagcctcttcgtactcattctctctctctcctcctattctctcttcctcaggggtcatgacaaaatcttccagttttgtttcacttatcccttaagcactctccaatgctttaacagttttctaaggtttgtttttcccttgctgggtagctaatgaattaattaagaggggaatattgctagttgcaaaagggaagtggggtctatagaggatctctccagtggcagcctctgtctctcaatctctctcccattctgtctcacttacagctggcagggagaggcagaatcacctgcagatgctgcctgtgggctgagtaaaatgcaccaacttttcaaggaaaaacaaggacaggcgattctaggccttaagggaaagatggtgaggtaggtctgacatctggcctttgatgagaacacagaacagtacttctttgtgggagttgggagtgagaagctgagaactaacttttatttttttttaactcttaattgcatttattttatgctgaatttattcccatgccgtaagtttttgtttcttcagtttcttttgagatatcttttttttccttatgtacaacagaaatatcatatgttgcagcaatatcagcacaaaagaaacttactgaatccttactgaaaaggaacagattgttccagattacttctcttcaggtttaggaaaaatttgttccttttcagtaaggatcatcttgatgtggcagggagagtacatgcatgggttaatccgaccatgagctctataaggccagtagcaaatcttaggtgctttatttacctgggtatgctcaatgacctgagaatctacatctacacccttaagttcggcatttctctcagcatttataaacatgtgcagcaaaaattcagcactcattttgggccaccaaccctgtgtccagccccactgcttggcctgggcactaccaactcccccattgtaacgtcagaatggtacacactgtttctgtgaagtgacatctttcagatacttggtggcttttcgtacaggcacacccttgttggcctgggcagtttcacgagtgttcttacaggaaacacaactatttgaaattcttgatttgcctgattttgaggggttttctgggtcgagtgaacagaaaactattttcacagatcacctcaggccacttaggggaagagcgggactaactttcttgatcttgcttttgcctgccttctcttttcacaaaggaacagatgttcctttcaccaatctttcaccgtcattcatttttcttcctccccttctaagacacacttggctattgcagaaacacagttccttaaacacaagtccaaaattcaaacagctctgaacattgaaagtttttggcaacctacattgcagcagaatttggcccaaactgacatgaggtgatatcatctttatttactcacatatttactataaaaatatcaattatcaatgggattgttttaaagtacagccccagttcctgcttgagtataatcaaacatatgtatattacctttctaaaatctgaaaatttttgaattctgaaatacatctggccccaaaagtttctgggtaagggattatagccctttatttcctgttttcctacatctttctctttccagctaagtgtaaaagagtatagactctggtaacccaagctgaattcaaatcctatctctaaatatcagttgtgtgtgattttgctctgtttacttaacccgtctgtgcttcagtttccccatttgtaaaatagggataatagtattacctatctcaatgttgttgtgaagatttaattgagttaatctatgtaaagtgcttacagtaatctctagcacatagtaagcactataggtttgctattatcatcaaccttaatccttcactctacccaaaaatattacctaatgtcccaattataaaatccctgctcttcgccctattccctccatagttaaccctctatccattttcttccactcatgccataaacagaaaaccatttgtcattagttaccattgactactcttcaactggctgaaatctggtttgctatcctatttctcaactccatggtaatttctctcattaaggtccctaatgcctcttttttttttttttttttttttttttatcttttttttttttttctttttttattattattattatactttaagttttagggtacatgtgcacattgtgcaggttagttacatatgtatacatgtgccatgctggtgcgctgcacccactaacgtgtcatctagcattaggtatatctcccaatgctatccctcccccctcccccgaccccaccacagtccccagagtgtgatattccccttcctgtgtccatgtgatctcattgttcaattcccacctatgagtgagaatatgcggtgtttgctaatgcctcttaactgccagtttaaaagactgctgtttagtttcttttgtgctgttatttctgcaacatataatatttctgtgacaaatagactcagttctccttctacttcattttcattctactgctccggtgactcgctcattaaaggttgacctccccaggtgtttcatcctttgtcctttttgtacagtacacatgctccttagaaaaatctcatccaatttaaagtgtcagctatcacctggataataatgactgccacattttatcattagccctgacctcttccttgtgcttcagactacatttcctatttgcctcctgtgtccagccccaccacttgacctgggcactaccaattcccccattgtaatgtcagaatggtgcacgctgtttttgtgaagtgacatctttcggatacttggtggcttttcatatatgcacacccttgatggcctgggcagtttcacaagtgttcttaaaggaaacacaaatatttgaaactcttgatttgcctgattttgaggggttttctgggtcgagtgaatagcaaaccattttcacagatccatctccacttggatgacctgcaagaatctcaaatgtaatatatcccaacaaattgtatgatcttctccctgacatcctgcccctaacccccattccagcccccaaagtaatctcacaacatgtatgttttttcatttttaatctcagctttaatggctttgcacacttcacctattagcttaggccagaaatgttgaatcttcattcgtctttaacttccacattcaatcagtcactaaatcccgccaatttgtttttagtaacatcgccagaacctgcctactgatttactaagggcttgtactaactatcatgtagaccagtggcttgacctttttgcccataacccatggtataaaatatattttacattgtgccctgggatatagacatgtttatgtacatctgtgctctattttatttcatttcacttttctaaaattatggttatgataccctaaattgattttacaatctaccaatgggttacaatttgcagtttaaaacaccctgacctcaaataatagcactttactcgtctcccctctcccgaccccggtgggtcaatagatagcacttcagaggttgtgtaccaaaacccttaaaggcagggattgtaatctgccaaagaaaatgctcccaagaaggtgattctgatatctcctatatgttctactcagttatcaagacaatactgaatatttcttagacatgtactatacataaagcacacagctgtggctcaaataagcatggttcactgatttggcactcacatttacatgaacttggaaccctcaaaagcccttaatgctccatgtattttcacacctccattgacactgcacatactattccccttgcctggagtgtcctccatactccctttcatcaggcaaatgcccatctgtagcaatgtatacaaaaatctatttatttaccaaagacagttaggtagcagaggggtagtagtggtactgggcccagtttatgtccctctccagttactctgtttcctggtcacaatggtcccagcaaccgccatggtcattgctgccagctcactccacaaagtctgtcacaatagcctgcctgcccctcactctttgatttgctgactcagaaatactggaagtcatattcatggtttatttaaacaaggaaaaacatatgtatgagcaggatgccccacaggtgttaacaaccacatggccttctgattaagaaagtttccatccttggatactcatggttttctcctcatttctctcctacctgggaaatataatatgaggaaggcactgttaggaatccccaccttaagggtgagggaactggggcataaagagattgagtgattattgcaaggcacttaaccaatatgcagcagagcctagagtttgaaaacatctctggagatgaaaatatgttccttttctctcctataatatttaagggaaaaagactacaaatccaatttgtacttgtctatgcactggtcctgtttctcctgccttctcatgaaggggactcaagcctttgtgtgtgtgtgtgtgtgtgtgtgtgtgtgtgtgtgtgtgtgtgcacgcacgcacgtgtatctctgtgtgtgtactctcaatcagcactctaaaatatattggcactctgaaatatatgtgtatttatgcatgttttataggcacatattactgtataatatactatgtaaattataaaacaaacacacaaaaacataaattcaaaaagcatgaatttttaaaattataagagaaagttctaatatttttctgcactccccagtatattaccttggatactgtattttggagacctgccataaagtatcatacttagtagaaaaacatattttctttcatatacaggaaaaatattgatccacaatcaatattgttcacagggttgcttctcaagctgtggtgttgtctgaatgtcatatcccccaggatgccattcaagacaagcatttgcagttttgagatggctaattctaattaggaaagcagactgccaccacaggttataatctgactaatgtgttcttggaaccgcggagctactgaagttttcgggtatgacgtcagtaaggagtgatgaaaggaggactggattaacagcagataaaagttctaaataatttgacctctgcttaaaatagcgatgggccttgaacaaaacatttaatagtaacgggtcctttgattaaattgcttttgcatgtatttaatattaattccactgatatgatactaaccctaagaaataagcatggctgatactagcccttaattttatatcataaatgagcaaaatcttaaagagagtaaatgacttgcccacacagtaaaaggcataactgggcttcacaatggtatttttgactcatgtattatcttaccttgcttaacctctttgggcttcatgcctttaaaataaactttctgttttagaacagttttaggttttaaaaaaagttgtgaagatggtccaggtagttcccatatactttacacgcattttcccctatgtattcgcttgctagtgctgctgtcacaaagccccacagactgggtggcttaaacaacaacagtttattttctctcagttctggaggctataagtccaagatcaaggtgtagaccaagatcaagaggcttttctggggcatctctccttgtcttgcccatggcctccttcttgctgtgttctcacatggttttgtctctgtcctgatctcctcttcttatcaaggacaccagtcaatttggattagggcccaccccaatgacctcattttaactaaactacctctttcagggccctatttccaaatatagtcaatttttttttttttaatctgagtcttgctctgtcaccaggcgagagcgcagtggtgcaatcttggctcactgcaacctccaactccctggttcaagcaattctcctgcctcagcctcccgaatagctgggattacaggcacacaccaccatgcccagctaatttttgtatttttttagtagaaatggggtttcaccatgttgcccaggatggtctgcatctcctgacctcgtgatctccccgcctcggtctcccaaggtgctgggattacaggcgtgagttaacattcctggccccaaatatagtcactttctgaggtactggggttaggactccaatatataaatttggatggggacacaagttagcccctaacaccttattattaatgctttacattagtatatttatcacaatcaataaacaaatattgatacattattattaactgaagtccatatcttatttagatttccttcattttcacctaacaaactttttcagtcccagatgctatccaggataccacattacattttgtcactgttatgtatttaaatgtttgcgtcctctcaaaattcacgttgaagttctaaccctaatgtgatgctatctggagatggggtctttggagggaattagatttatatgaggtcatgaggattagtgtcctataagaagaggaagagaaaccagagcttgatttatactgacaccttgatcttagactatccaacctccaaaactgtaagaaacaaatatctgctgcttaagccattcagtctgtggtattttgctgtgccagtagactaagatagtcatcaggtctccctgagcaactcttgactctgacggtcttacagttttcttgtttttgatggccctgagagttttgagagtactggccagatattttgtagaatgtccctcaattgggatttgtctctttttttctcattaatagactggggttatgagttttagagaggaagaccagcaaggtgaaatgtcattctcatcacttcgtatcaagggttcatgctatccacatgtcctatcactgatgttgttgacattgatcacctggctgagatgctgtttatcaggtttctccactttctcccataatattactcttttctccttctttccatactgtattctcacttacagaatgggaagtttaggacttcacatgttatttgtaaaacagcaggactggattagtccatttctaagtcatctctagtttgttccttataatcaatgagaagtactgtcctgattgaaaaggaaatctgtattcacagaacagggtgagagagcaggatcacttaggttcaaacccttagttttaaccgtcttagcgttctttctgaacagagggactacaaaaaaccattgtgaatgtagcaatttaatgatctacttttttgcaagttggcaccatattatgtattgatcagccttggacagatcactgtgtccagactcaattctgaaaacttgtggagggttggagagtaggggtatgtctattcttcacctaacaacactgatgatgatgacactgttggtcataaagcaatactcaataattttgttgattgctgatcagttacttcaaacacaaacttgtagaccattttctttctttctttttttttttttttgagatggagtctcgctctgtcacccaggctggagtgcagtggcatgatctcggctcactgcaagctccgcttcccgggttcacgccattcttctgcctcagcctcccaattagctgggactacaggcgccccccaccacgcccggctaattttttgtatttttagtagagacggagtttcaccttgttagccaggatggtctccatctcctgacttcatgatctgcccaccttggcctcccaaagtgctgggattacaggcgtgagccactgcacctggctttgtagaccattttctagaaccaacaggtaaaatttactagagattttatcttggacgtgaactctaggtagtttacatttcttattctagcatatagtgcatgcattgagattctaccaatataaatatgtaaaataaggcaaaataaatgaatttcaaaaggaaattaaggtctttaagctttatctatgtgaattatccttaaaatgtgaagaattgctagctgttttttatccaacttcttatttcctgcaccagtttgaaacatactctccttaagaaattcttaaaagtttccaattactgtaagaataatggaaatttttctctttaaataacccgaacattaatttgttgttctttaacaggatttcctttttaatgattataaaagctcatctgtccatgatatatagcaatgtacccatacaatatgaaattgtattttacccataaacagtcttcaaacaagacacacaattttcttgcttactggctaattaaaataaaatttaaacccacattaaacttgattacattgtcaaaacacccacatttttaaaggagaggcctacagtgttaattcagagagagtgattctttactcttcagctaataatcgcttcagtattaataataacttcagctaaaaatagcttcggtagtctcagatttttaaaatcatgtcaatgtaatcatgcttttatgtcctcttcatttgtggaaaaggaaacaaatgatttgtcctatgtatgagaagatcttttaaaatgaagtttctagggtttccaagttggcaaaacgtttgtcagtatcatcatttggtttgtagaccacattgattcatatactggctacactgcatattaattgcagtttctttattatggaatatttaaaatgcacaaagatacacagtgaactataataaatacccctatgcgcccacctccaggaaaagtaatcattgtgtttttaaaaaataaaacatcatactggagttcctctttgtttcatgttcattctctttcttcctcaggagttatcagtgtgctgcagttgatgtgcattttactcttcgttttatcatatctgcccacaaccacaaatgccataggactgtgttttgtatttcaacattttatttaaactgtatcatattttctgtatcattctatagcttactttcttgactccatatgtgaattcaagagaaattaatgttgatgcatgtagtctagtttatatttttggctatctagtattttgtcatgtaaataaatcacaatttgtttatccatttcccctatgatgagctttaagttgttccacaaagttgagtcttgcaaaggttgctagactgaacatccttgtgtattcttgtgtacgtcaactgtgccagttgtggggggagaatatacctagatgaggacttgttgggttggaagacaagttaacttcaattttaccagatagttccaaattactctttggagtgattgtagcagaattcactcccgagtaaatgaaaatttctatttccaaatatcctcaccatatcctcagacattttaaatatttaccaatctgataagtattcttcttgctctcattttcctgatgactactgagattgagcatttttcatgctttttcttgtttcactttaccttctttttctgtaaattatttattgccttatctttttattgcttcataagagttctttatatatcttgggtattaatgctttggtatgcaactagtaaatatctcttcccagtttataacttgccttttaatttaactttttaaatatgtattgactaagaagttagatactagtcatttaactttatgtaattttttattctatagataatttaaatttcggaacagccatatatatgtctagtttcttttcattttgtctttcaatcagctctaataattttctcaactgagatcttgtatgagtttcatttatttttaactatattatagtttttgtttttcttttttaatgagctttttaaatttacattttctaaatgattttttgctggtatatatgagcactatggatggttgtacattaatctttatatgcaacaacattgcttaactctcttgcttttccctacaggaaaatatattaaaataaccatttttttctcccttttcaaaattaattcctattttttgtcttattgcattcattagaaaccccagtacaatgttgaatagcaacattctgtcttcttaaccttaaagacaatacttctagagtttccctattaaatatgaaatttgctatatttttggtatatggccaaaagatgtacatgtaagatgtatcagtcaatatttagatttggaggtaacagaaactcaccccaactatcttaaactgaagttgggtaaatctgattctttaggtcgctgctgagaactccattacggacatcactgcttcttggtactcagcactaattccatcatgttctcattttcatagctaccagaaaaacttctccactgttcttgtatcttactgtcgctctcttgagagtcaaaggcctagatgacagcattcaattagctggagctaggaactaacatgactgagttgggtttttcctttcttgtacgatccaggcccagttttggtgtcaagattgtactagcttcataaaatgaattgaaacacttttctttttccttcccttccttcctttcttttcttctttctttttttttctgaaattgattaagaaaaaaagtatcaggtttttgaaagtttggtaaattgtaaaaccattctggttagtgcatttttagggacagggaaaatagatagacaaaaataataatttattcagttattagttgtctgttcaggctttgctatttctattttggtcatttatattttttggatacatcagtttcttttaatttttaaaagctttgaagataaagctattcacagtattcttttaagttattttttcaaatttgtacagtatttatagttgtcgcttctttttcattcccagtacaattatgtatcgtgctttctcttttcttttgcttgaccaattttgctacatgtttatctattttattagttttttcaaaccagtttttatactagttcatcaggttctaaaaattatgctgcaatacttatggcctaaaaggaatagtaattataatttttagtcatatgtagtaactactaggaaaaactttatttttctgttttaattacattaaaaagtcccctggaaaatatgagttaagtgttttctcctgcggagattgcagtgagccgagatcgcgccactgcactccagactggcgacagagggagactctgtctcaaaataaataaataaataaataaataaaagctttttcctatctagtttttacaaggaaaatcttttttatttatttattgattgatttgttatcataatactttaagttttagggcacatgtgcacaatgtgcaggttagttacatatgtatacatgtgccatgctgctgcgctgcacccactaactcgtcatctagcattaggtatatctcccaatgctatccctcccccttccccccaccccacaacagtccccagagtgtgatgttccccttcctgtgtccatatgttctcattgttcaattcccacctatgagtgagaatatgcggtgtttggttttttgttcttgcgatagtttactaagaatgatgatttccaatttcatccatgtccctacaaaggacatgaactcatcattttttatggctgcatagtattccatggtgtatatgtgccacattttcttaatccagtctatcattgttggacatttggcttggttccaagtctttgctattgtgaataatgccgcaataaacatacgtgtgcatgtgtctttatagcagcgtgatttatagtcctttgggtatatacccagtaatgggatggctgggtcaaatggtatttctagttctagatccctgaggaatcgccacactgacttccacaatggttgaactagtttacagtcccaccaacagtgtaaaagtgttcctatttctccacatcctctccaggacttgttgtttcctgactttttaatgattgccattctaactggtgtgagatggtatctcattgtggttttgatttgcatttctctggtggccagtgatggtgagcattttttcatgtgttttttggctgcataaatgtcttcttttgagaagtgtctgttcatgtccttcgcccactttttgatggggttgtttgtttttttcttgtaaatttgtttgagttcattgtagattctggatattagccctttgtcagatgactaggttgcgaaaattttctcccattttgtaggttgcctgttcactctgatggtagtttcttttgctgtgcagaagttctttagtttaattagatcccatttgtcaattttggcttttgttgctattgcttttggtgttttagacatgaagtccttgcccatgcctatgtcctgaatggtagtgcctaggttttcttctagggtttttatggttttaggtctaacgtttaagtctttaatccatcttgaattgatttttgtataaggtgtaaggaagggatccagtttcagctttctacatatggctagcccgttttcccagcaccatttattaaatagggaatcctttcctcattgcttgtttttctcaggtttgtcaaagatcagatagttgtagatatgcggcgttatttctgagggctctgttctgttccattgatctatgtctctgttttggtgccagtaccatgctgttttggttactgtagccttgtagtatagtttgaagtcaggtagtgtgatgcctccagctttgttcttttggcttaggattgacttggcaatacaaggaaagtcttaacagatgtacacaatttttgagacatataagtaggttttttctccaataaacagatgtttataaaggatttgtacgtgccattatgataaactacaaagataaatacacatgctctgttctctaagagttttccagccaataaaaatttacagctactctttattgtccaccatactctgttatgagccatgggctttagtaagttctcatgacattgggcactgacttcctgggagtgtaagtgactcacctggaccccacagccagtgagcattagtgcttatattccatcctccaaagctctttcttcataccagaccacacatgtggcccaaggagggatatttactctgcacttttagagttctagaaaacattgtttagtggtctggcatcatctatatttacttggcttgatttgggatagagtataatcctagtcctcgatgaaaggattttgatgagttaaccttatggggtgatgggatttatgggattatttccacacttaaaatgatttgtgggaaaaaaaagtgtactaatccctaatttaggattaagacagatatacctatgagatatgggtctataaaattcatcataatttgagaaatgcaacaaataatcacctctaaaatatcttgttggttcagttattttagtccaaaagccagttggagatctgttctgtatcaagggctccagccctcttgtgagaggtagctgtttttcattcgcttgtagtcttgaagtaaaaacaatgtcagggacggtctcctcagaaccccagagggtctgccttttaggaagtgtttgtcccctcagaaacgagaaaccagatgagctgagtttaggggtcagaccagaggaaatggctggaaattagaggtctcctggctaattcacatgatgccaaataacagtctttctgttgggtgtcagaatccagaatggtgggaaatttgtatctaggggatataaaagaaaatgaatgagataatatatgcaaacagatgagtagagtgcctgaaatgtactaatagccttcagtagattccttctccaatttcaccccttctccatctcaggtttggctttcccctggacctgtcaataaaaaccctgagagtttgattgaacaatggcactgtatggtcaatgctaccagactctttaacatgccttgtttgccacaatttcattgaatgggagcagaatggcaaccaaaccaaggctaacagactttgtcctagaattcccacaccaagtaggaagcataaaataacttagagacttgactatagttcctgcagctattagtcatggtgtgttagcagaacacaatctcagaaagttatttcctaaatgccttccaaagccttggttcttcatgcagatagttttggccaactgtaatggcagtgagaaacttcacgagtgtccagaagaacagaatttatactttaagtttaactttgttttggattgaatgttccttaaaaataaaccttcacctgattcttattttcatttcaattccatgggctggtgatttgagtgtcagggatagagttcttagaatctgtttatgtggtgtgaatacagaaatggtctgattctgagtattaggatcatgatcagagttttgatataaactcaaaacctcactaagccacatgttattttttgaagcatagaaattggactttgcaaacaaccaaaatccttttgtttgagaaactctaaataagcattgagttttcttgccatgaagttttacactgtatctagaaagtttctttgaaaaattcctctgtaaacctaaggctgacaaagaagttggctagttgaagggaaaatgatacttatgttttgtggcaagggggaacaaaaggagggggaaaagtaattactgtccacttaacattttatattaaatttctaatgcataattttcaagacgggcaagagttttggtttgttttaaccaaatatagttacaatattaaatacgtgttctaaatccagcatgtgaatatcacttcttcaaaaaatttttaattttttaaattgaaaaataaatatatgtatttatggtgtacaacgtgatgctttgaaatatgtatatatcgtagaatagctaaatgatgctaatttacatatgcattaccttacatattcatcatttttttgtggtgagagcacttaaaatctgctgccttagaaatttacaagtacacaatgttattaactacagttaccatgttgtacaatagatatcttaaacttattcctcctgtctaaccgaaattttgtatcctttcaccaacatttccccaacccctcatccccccactcctcaccagtaaccatcattctactctctgcttctgtagttcaatttttttagattctacatataagtgagatcatgcggtatttgtctttgtgtacctggccaatttcacttaacataacgtcctctagtttcatccatgttgttgcaaatgacaggatttctttcttttttaagactgagtagtattctattgtgtatatgtgccacttaaaaaaaatccattcatgtgtagatggacactttggctgattccaaatcttgactattgtgaataatgctgcaatgaacatgggaatgcagatatctctttgacatactgatttcatttctttgaatatatgcccataagagggattgctgaatcatatggtggctctatttttaagtttttcaggggcttccatgctgctttccacagtggctgtaccaatttgcaatcctaccaacagtccacaagtgatccattttctccacaccttcaccaacatttatctcgtctttgtgttgataaccatcctaacagatgtgaggtgatctctcactacggttttgatttgtgtttccctgttgattaatgatgttgagcatttttaaatgtttctgttggctatttgtatttctgtatgtcttcttttgaggagtgtttccaggtcctttgaccatttttaatgggttatttgttttcttgctattgagttgagtttcttatatatactggatattagcccctcaccagatatatagttcacaaatattttctccttgtccatgagctgccttttcattgtgttgtttcccttgctatgcagaagctttttaatttgatgtaattccaccttttgtttgcttccttttattgcctgtgctttgggggtcatatctaaaatatcattaatgagcagcttttccccattgttttcttcaagatcaatgtcaaagaggttttcctttctgttttcttctagtttgaggacttatgtttggatttttaatccattttgagttgatttttgtgtctagtataggggtctagtttcattttttggtatgtggatatacagttttcctaacaccacttattgaaaagactatcaatttattaaagaaaagttttgatttgttttatccaaacacagttacaatgttagatgtgtgttggaaaccagcatgtgaatgtcacctcaacaaattttaacaacagaaggaatgggaacagcaaggggatgaggaaataaacagaacataggatttaacaatcaatgggatattaacacatttatgcctgaggttgcaattttttgcatttttgcaatcagaccttgcaatgaccttgagcagtaagatataataactcccatgcttagcgttccaataatggaacactaggcataaatgggtttaagggcacttggggtcacagatgtaagcttagaaggggattaaatgtggccaatgccttgcttttgcccatttaaaaaatttcaactaattctgatgttgttctaacattctgtgattacaggatggtaagtttgcatggtggaagatcagattgggcaccaggataatggccacagggacctcagtagagctcccagtaactcaagggcaccaggagtatgtaaggagtggagagagtgcacaaagaaaaacttgacccacttcataatttaagctaatgtcaatccgcctggcacttcagagtcttatttctcaaaacgtggccccagaacagctggtacccaaatgccctgtgggtctgttaaaaatttaagttcccagaagacactctaaaccagtggaatcagaacactgggaatggggtctgagaagatacattccaaacaaatagcctaggcaattcttaggtactctcgtgattgaacctctgcaccaaagagggaaaagtataagttagaaaggaatttataagcaccatacacaaaaatagccatgactcaggcctccacatctcatttgtgctgtcacttcccctgggaagcctgatcaccccaaatgccgcattgtataatcttttttttttttttttttgaaatggagtgtcactctgtcgcccaggctggagtacaatgacatgatctcggctcattgcaagctccgcctcctgggttaaagtgattctcctgcctcagcctcctgagtagctgggattacaggtacctaccaccacacctggccaattttttgtattgttagtagagatgaggtttcatcatgttggccaggctggtctcgaactcctgacctcaaatgatccacctacctcggcatcccaaagtgcaggaattacaatagtacctaacatactctattgaattgctggcttttctttctctttagcccatgtaatccagtgtcattcatctcctctgcttaacaaagagcttagttcatgaaagccgcccaataaatgttctttaaattaataaatgacttcatgtcttgctgttccaaaatatactccttaacctgcctgaatactttcacttcactttgccaattatttcatttggtatatctgagaattttagtttaaataatgaaatcagtcagttatccagtagggtcaattaattccactttcgctttcccaaagattgtagagcaaccacacacagcgaatgaggaagcagtgatgcaagtaattttgaaacacagttttagagttaaattgtttctggatgcaggcatacaataaatgggtaagtgctgtgtgggggacactgagcaccgaagagttggagggaaagccccagggagttatgaaagggagtacagggaacagggaagaaaaggaagatgtaacctacttatctaaaacttttacctagaaatgaacctgcattcagggtcatggtgggagaaaacactcctcctcctttgatggctgtgacctcctcatagttcctgaacatagcactcaagctggtcctaatcccactacatgaataagtgaaataggctttgagaaactagtctgaaaagttggtcaccctatgaaaaaatgcatgcaaaatcccagaaaacatttcaaaacttttgaaatctaaccaactcagaaattgagcaaagccaagattagatgtgtcttgcagatcaacttagtgaaagcagatgttactcgtgaagacaaaggtcaggaccctagagacataacaagaaatattttatgagaaggaaacttgatgtggattgaaaggcagaagaaatgaaaagaaaaaggcacatgaacatttttaagcaattgtaacagaatgaccaaattgcctgaaccccagacatatgataaatcatataacatgaataggcccccttcaaattggtggcatgcaacatggcaaaacccatctctactaaaaatacaaaaatcagctgggcttggtggcgggcacctgtagtcccaactactcaggaggcagagacaggagaatcgcttgaacccaggaggcagaggttgcagtgagccaagatcatgtcactgcacttcagcctgggtgacacagcaagactttatctcaaaaaaaaaaaaaaatggttgcatgagcaattatagtgatggtgactccagttttgccaagatataagcaagattgaacaggccagaaaatgtggatatgttagtgcaagcaaatcatcaattctttttttttttttttttttgtatttaagttctgaggtacatgtgcagaatgtggaggtttgttacataggtatacatgtgccatggctgtttgctgcacccatcaacccgtcatctacattaggtatttctcctaatgctatccctcccctagcctcccaccccccaacaggccccggtgtgtgatgttcccctccctgtgtccatgtgttcttattgttcaactcccacttacgagtgagaacatgcagtgtttggttttctgttctggtgttagtttgctgagaatgatggtttccagcttcacccatgtccccacaaaggacatgaactcatccttttttatggatgcatagtattctatagtgtatgtgcgccacattttctttattcagtctatcattgatgggcatttgggttggttccaagtctttactcttgtgaacagtgctgcaataaacatacatgtgcatgtgtctttatagtagaatgacttataatcctttgggtatatacccagtaatgggattgctgggtcaaatggtatttctagttctagatccttgaggaatcgccacactgtcttccacaatggttgaactaatttacactcctaccaacagtgtaaaacaaaacaacatatatttattaaacatatgtgtctctgtctgtgtgtgttacacttaggcacataaaagatatttaacaaacattgttgaatggataaatgactgaatgagcagctactatgtgtcaggtgctagaaatagccaaaatgttctaaaagactgtggggaattagcaattccttttagaacaggagtccccaaccctggggccatgaaccagtacctgtccgtggtctgttagaaaccaggccacatagaggaagtgagtggcaggtgagtgagcaaagcttcatctgtattttacagctgctccccatccctcacattaccacctgagctctgcctcctgtcagatcagcagtggcattagattcttataggaaagtgaaccctattgtgaactgcacatgcgagggacctagactgcgtgttccttaagagaatctaatgcctgatgacctgaggtggaactgaggcagcgatgctagcactcagcagcagctgcaaatacaggttaacatcagcagagaggcttgactgcatagaaaccataataaatcaattgcttgcagactcatatcaaaaccctaaaagtgagtgacatgtgacaagtaagctgcatctggtggcaagctttatagtggcaagtgagttgatgtacttcaattgtacagctgtatctggtatccttaaaagtatgtttcagacaatttcaaatctccatatgttctggattgaagtcaaggcagaatatcctgagattgctacaaaagctctgaaaagcctgcttccatttccaacatcctatctttgtgaagcagggttttctgcagtgacagcaaccaaaatgagattacagagtagactggacataagcaacacactttgggtgtcactgtctcccatcacccacagatgggaccatctagttgcaggaaaacaagctcggggctcccactgactccacattatggtgagttgcataattatttcattatatattaccatgtaataataatagaaataacatgcacaatacatgtaatatgcttgattcatcccagaaccatgcccccgaccctgccagtctatggaaaaattgtcttccatgaaactggtccctggtaccaaaaaggttgggaaccgctgctctagaatgtcccccttggctgaggagtccctgatcaaccactgaggctctgcttaagtgttccctcccctgcaaagtctactatcaccctaattaattactattccactgaaaagctcatcccaccatcttacactggttagatgttttacctgcttgtcttcattactaggataaggggaaaaaagattctgggtttgttccatatttgttttccccaaatctactgtttgtaatagggaaagggagaaaggaaaggcataagaaagagaagagaggacagtaggcagggaaagaaggagagcaaggtgaagtaaatcatgttcttttgcccctaaggaaattatgttacatggtaggtttgttgttagatactgagaccctgattctaccttatattcaatggacattgtttaattgcatttattgctttaccactctggaaagaaatgtattaatttaaaatgttttggatcaattatttctttttattacagttcttacggcttattgaaaccactcagcacacttttaaatatgtaaaatgtatgatctgagtcatgataaaaaagaaatttcataggtaacagcatcagtaaatatgtggctgcactttcagtgctgacctacctatattcttttctgagtttacaacctcagttatcaacaactgacattactcaatagttggcacatggcatccaatgcatggacttgaaagtaggcttttaaaattacagtaatcggccgcgtgcggtggctcacgcctgtaatcccagcactttgggaggcggaagtgggcagatcacgaggtcaggagatcaaaaccatcctggctaacatggtgaaaccccgtctctactaaaaatacaaaaaaaaaaaaaaaaagccaggcgtggtggtgggtgcctgtagtcccagctacttgggaggctgaggcaagagaatggcgtgaacacgagaggcggagcttgcagtgagccgagatagtgccactgcactccagcctgggcaacagagcgagactccgtctcaaaaacaaaaacaaaacaaacaacaaaaaaattacagtaattactgtgggcatgataattgtatgtgtcaacttgtgttgtgtgccacagtgtttccagatatttggtcaaagagttttctggctgtggctgagggggtgtcttcgatgagattaacatttgcatcagcagactgagtgctatgatttgaatgtttgtgtcctcctctccccagaattcatttattgaaactaacccttaatatggtggtattaagatgtggggtgtttggggccgggcacggtggctcacacctgtaataccagcactttgggaggctgaggcaggtggattacaaggtcaggagatcgagaccatcctggccaacatggtgaaaccccatctctactaaaaatacaaaaattagccgggcatggtggcacatacctgtagtcccagctacttgggaggctgaggcacaagaatcgcttgaacccgggaggcagaggttgcagggagccaagatcatgccactgcactccagcccgggcgacaaagcgagacttcatctcaaaagaacaaaaaaaaagatgtggggcgtttgggaggtgattgggtcatgaaggtggagcgctcattaatgagcttattaaggagattactgcccttagaaaagagcccaagaagtctatgtgctccttctgccatctaaggacacagctagaaggcaccaaagagcaagtccccaccagacactcagtttgctgtgtgcatgtggagatctcttggtgccttgatcttgggcttcccagtttctagaaggtgagaaataaatttctattgtccataaattactcagtttaacatattctgttatagcagcccaatggcctaagacactgagtaaagcagattgacctgaataggctataaatggaaaggaaaactcttcctgcctgactgcttgatctgggacatcagtctttatctgtcttctgactcaaactaaaacatcagccctttggggagtctcaagcctactggcttgagataaggggaaagacccacccccatgattcaattaccttccactgagtccctcccacagcacatgggaattcaagataaatttgggtggggacacagccaaaccacatcatcagggttttcttacatagtgttgataatcctttccagggtactgggtgtaatgagccttaaaggtctttaggaccctgatgtaaagactaaattaaagatgtgtgtttgggggcaagtagaccacttcagcacctccagtgttgaactcatggagttctgggtggccaggggcattgttcaatatcaaaagaaccttaaatggcagtcccttactggcaaggtacctcctgacttgagggacaaagcataaatggagtcaatccagaaaaagagttctcattgtacaggccttcttgtacaaccaaaagattggcaggtggtgtttaacttttcccttcaaggctcaggggttagctgctttatagataagggcagtccttatcataaaccgaactgcatttgcacaaaacagtagaggtagcccatctcttcctgccttaaatcctggtgctgacttctttttcttactaataaatgtccttcatggcatttttttgcagaacagggcacctttatttgcattaaaaacctatttagtacacctactatgtaccccctaaaattttaaaaaattaaaatctatttaggcagatattcttctcagtgattgtcttaatggtgcctgggaactcatctgctgcctattggttggcaaaacctgattctcctgttatcgtcacatttttaaaaccaaacatctttctaaaactatcacaccatcttttgctggcattaaattcttcagctttagttcctttaacttccttttactttaagttgttatatgacttcactttttttcaaataataatagagtatttaggcatggtttttttttgtttgtttgtttgtttgttttagatggagtcttgctctgtcaccagtctggagtgcagtggcgcaatctcggctcactgcaacctccaccttccgggttcaagcgattcttctgcctcagcctcccgagtagctgggactacaggtgcacgccaccatgcctggctaattttttgtattttagtagagacagggtttcaccattttggccaggatggtctcgatctcctgacctcatgatctgcccaccttggcctcccaaagtgctgggattacaggcttgggccaccgtgcctggccaggtatgcctttcttatagcaattctgcaccgacataaaagctccattttcaatatgagataaaaaggtattttgcaaaaagtataagtttttatacctgctggtgtagctgcagtgacagcctcatgaattttctttcttttttaacaatgggccttgcactagattcatttatcttgaaatggcaggcaatcgcagctgcagacctccatctatggtaaacatcaagcagttcaactttttcctgtcatgatttttctctgcttcttgggagcactttcagcaacactaatggcactttgtatagatcccatggtgttattcaaggtttacagtattgcactaaatataatgaaaaatatgtgagaacagtgagaggtcactttttactgtcatatggaatttactggagacacaaactgcttatacagagataattagtgacatgaaattttaagcagatacttgcaacacctgagcttagcacaaaagcaacaggagctggctatgacatttttgcagtaatacagtatgtacagttaattgtatgcagtaatgatttaatactttatgtttgctcacatttctcttgactgtgaatggtacatgtgcagtctgtatttgggtttgaaagttttgagaaattttaactttttataatagatttgtatgtattttatcataatgtatgataaaacagatgagtatatccctagcttttttcttaatttctttttatatttccaggccatatggttcaactgcaagtttttaaaaattgttgcaaatctccaaaaaaggattcaatatgtttattttttaaaattgtatataattaaacttgcagttcaaagatagacttgaaccctaattattccaatggataaatcagtataaatatgtagttattttttttttaacatgagaagagatgggaagttggttttggacaaatctgaagctgtttctatgatattctataatattggtttgtttccttgatatttatgtatctttcacataaaaataaaatataatagacaatacattaaactgggagcccagaaactttggttctaggattgaattatatgtgagacattcaataaatcactgaaccttctaggcttgagttccctcactttgaaagtgaaaggatgaaatatttagtttcaggatactaaagacatcttgatccctaaactgctttctggaaaaaagccaaaagcaacaaggaaatttagcagtacacactcccatctgtcattattagaaaatcttcattaacttcaaccataatatatatgaagaaaggctggcaagtatagtgaatttggaccagagagaggcaagaaactgaaagaagatggttactggacctcaaaggatgacagtgcagaggtctttgaagtaagtgatacacatcaaggggtaagacatgatagaacaagatggatggcctcaaggagctcctgaaaccccacaagaaacccctccaatgcaggggatgtgatgacaaatgaagacacatgcagacaagctaactctacaagaaactatctgtttggaagaccagatgagaaactgaatgataagcagcttgaggctgtcaatctttatccgccattgaatgtaaactccagggaggcagaaattttttttctgatttatctattgctgtattctccaaacctagagcagtacctggcacaaagcaggtgcacaataaatatttgtatgatggatggatgagtaaagaaagattacagctaaaccacacaatcgacatacttgtgtgtatgtgtgtgtgtatatgcacacgcatgcaaacatgcaaacattaccctgtcacctctagagaaaaatcccttcattattgaaaaggaattaacataggatttatgcaaaaataaccctatttacataaagaagcaaggcaacaaaacaaataaaaatcataaaaagggcaaccaccaaaaatatttttattgccctagagaaggtaaaacttgtgaccaaagttatctgtgagttcataaaacttaatgaataaggtgacctttctgtgttaggactccagagtgaagataagaagtctcaaatttaaaaaaagataaggcaataaaaaatgttaaaaaaggtatttggtagatcttgggatagaagtaaaagagcaaaataaaaacatcaaagaaataaaagctttgggccaggcacagtggctcacacctgtaatcccagcactttggaaggtagaggcaggcagatcacctgaggtcaggagttcaagaccagcctggccaacacagtgaaacctcgtctctactaaaaatacaaaaattagctgggtgtggtggcgggcacctataatcccagctatttgggaggctgaggcaggggaatcacttgaacctgggaggcggaggttgcagtgagccaagatcacgccactgcactccagcctgggcaacaagagtgaaactccatctcaaaaaaaaaaaaaaaagaaaggccttaatgggaacagcaatgttgcccatgttgaaaatataagtgaagacattcatgacatcttgagaaagtggagcaaaatgaaatagaaaagaaaaaagactagagtaggaaaaaattgtagatcgagaacacaggggaaattgacaggtacaacacattggatttttattagaaattatatgtaaaacattcaatattcttgtttttaaagacaaaatcagaaaaaaatggagaacaaaaatatccaaagttatatcaaaaaactcctgaaataagagatttgaatctgtagaattaaaggacacacaatattccagcaaacataaatatctattaatttccatgcataatctagtaaagttaaggaacttcaaagaaaaataaagaacccaagagtatctaaaaaaggtgagggcataaatatcttatctgaaaagcaaaagaataaagctagcttcaaatttctctccattcagtgctaggaataatgaaatcatcaagttctcagggtaacaaagtatgacccctaaattatatacccagacacaccaggcttgtttcttctgtccatctgtgcaataactttttcaaatgtgtaaaacgtaggggaaaaaaacctacatgagctttaaaaaagctgttagccaactaggtcaaccaagatataaatgatgagctatgagcattaagtcattttaaatttaaaactaaggttaaaatgacttcaggaaattagggtgtgcagaacagaatagaaatgtaataagttatccctttataaaaataatataactaacaaaaatcaggagcgagagggaaatgaaaatgggagataatttaagtaccaatcttctcatttttaaatatattgtttaaggctgatctgagactaaggctgatctaagattaagcacataactaaccaaaatgagtgtagcagaaaagaaaagcaagaagatggaagtaactggacatattctaaaagcatcattcatagtgagaaattaataggtactgtttaaaggaagagagaccttacgatacataaagttatatcttacaaagtaacaaattactagaggaactcaagtagatcataagcctttcatattatgaaaaattgaccttagaaatcacagaccaatggtaaaatattaaaaacaaagtgtaatgaacttatccttccaggaatgctggtttacatcacataaaccactcctggtaagaaaaattagcaaagcaggattcaaaaaaatttaatcgcaaaatagtaaacaattatgaaacaaagaggagaaaaagggaaatcagagaggtaaatcctaggaacgtgattcaaggaatagttgagcagaggtttggcagcactatagggctagacagtaagaaaaaaaaatctatcaagaaaggatctctgataaaccccctacattgagttgggatcccaaagggctccatctagtagtaaggggtagctggaaaaaaaacttgggacagaagtccagttttcaaccatcttagttcctctaattggattacggtaatataagattgctagttcccctaaccaactgccatgagcaaatggaaatcctaccaggaaatacaattttaggcttcaaatgatttcaacactttttgtatacaacatcttgcacacaataaaaagtaaccagacaaatgagaagagaagatgatgtaataaaaaattgagagaaataccagcaacagaaatgaatgcacaggagattcagaatatgaataatcagacattttacaatttttaatagagaaaatttttttaaacccaaaatggattctttgaaaagactaataaaattgataaacctttggtaaggttgattgaggaaataaagaatcagaaataaaaaaggagtctattatcacagagcctatagatatttttaaattatattatttaaatatattaactttatgtctctaaatttgaaatttttaataaaatggatatatttctataaaaaacaatttaccaaaactgacatatgaagaaatagaaaatatgaatcattctgtaacctttaaaagaattaaaaaccataacaaaggccatcatgatttccccagagttatttaactcccttttcccatgtaaaatttacttccaaatctttgagaaggcattccttacttcagcaataggaatcttcagggttttttttaattatgaggacatattttcccttcctcatcttatttaactcagtgttataaaactgttctatgatttacttttgaggattatatatattagcttctcatatatttcataccctaggagtttagatcatatagcatgatagtgaagggagaaagggagaaaagtgggagacatggaaggggagcgaaaagagagctgtcctgatttggattgttacagttccatatctgcacccccagcagtttatttatgatggagagaaaataagtaaaaatatatgtgacttgattttcagtttgaaaatgtgttaatgagaaaaaaacccaaatcaatctaattctttatgcttactttatggaaataaaaaatttctgtactatgtggtagaaatgagtgtgtgccattctgggaaactgttcttcagaccacctggtgacctatcagttaatcaaagcatttgacattttttctaaagaaaagagggtgaaataataacttggcctttcttaaaaaaatatacccatggattctgtatccttgccagttgtctattacatagtttgttgagactgcccaacgttgtctggaatttccaagcctcagcgctataaaaataattcactagaactgcctcaaaataatttatattgtgtaattacttaacactgcactttggactacagtatgggatggatatgctaggaattatgctgggttcagtgagagttctgcacaaaggcctcttttgccgtaactaccaggttcttgatgtttaaggaattgtgttgataggccctagaaacttaggacctacaattactggagcatatttattgcagcacagaagagagttgatggtggctgatacaatattggtataaacaaggtcactagtgttccagtatgaacattcaagagcccttagggaaaacaaagaagtcactttcacaaagaactttcaattgcctgctctctgatactaaaacagaatttaaaaatgaacctagttcattttttttcttgtctcttggcgaaaagaccacagaaaactgatccttcacttaatttcaagcaaaaattgtattgtttttggtgaaatccattttttacctcaaggattcagcctaaggttatcacatcaaaatatattttctttaaaaatctgaagtttggccttgaattttaaaggaaattctgcttgaattattatataggatgaaatatttaagtattaatctttttttctctctttcaatgaattaagacaaatacaagcaccttttaaaaatcaggcagggaaataaatgctaattaaattctcttaccagtagtttttcattttgtgaaacaaacttttctagatcggatagactttactgacgagtgtttttgataatgctgaatggaattgagtatgacctcccagatacagatgcatttggacttctcatccacttagtctttttcattcaaactggaaaatcatgtggtttcatttttattatttttttaattgagaggattgtcaggagaaaatatgtatgtggctttatttttattttaaccaataagattgtcagtaggaaatgcattctgaatatagcacacatggggcaaatgttcctttttggtcatgacattttttcattataatggaggtttgccagggcatataccatgttttaatgccttttacatataaaatcacaacaagataagactttagacctctctgtaaaagctgcggtataatgggaactagcatgctctgactggttgcctcaattaataaaacagtcaggaaatctcgagggtttccttccacagatttgagtatcccttgatgacctgcataaaccctagttcttataaatctgttcactctcctgcaccggaggaaggggagatggaaagctggcctgttggtgacatacacagcattatgcttagaaaagtatgggtttcttccatgctaccatcctactcttggcatgaaattatactttgtgatcctacagtcatacatatgaaggaactacacacataggagacagcgtgaccctaggctctgactgggtatctttgtttatattttgataaagaagtttatggaaaaagttatttttaattgaacaataatttgaggcatggtaaaaaaaatatgtattgtctaggaattattatttaatatttagaaaaaaacatgaggctttaacttgaagaaataaatatattttcagggaaaatctatgttgtttcttatttatttgcactttggtactctagaacaccattaggatgtcttgtttcagattttaaaggtaggtattatccctgtgatccttcgtgtgcaaactagcttagcaacctgcgcccaggagagtaaccacagaggcagtggatctatcccatgctcccttgcatgaaccagcctggcactttgcccacagggaagcagcgccagaaccagcaaactagccacacaaactctagcagcctaggtcacagaggcacttacaggcatcactgacattgactatagaaacttcagagaggctacactactgtcctcacccagaaccaaagccaatgcactctacccaactgactccctaggacacaccttcaggtgaaagtcttcccctctggaagctactgtataaaactggaagaggcaattcttccaccagatgcataggtatcaacagagggacacaagaaacacgacactgccaaataagcacagtgattccccagttacttaacacaaagaaatagaaatttatgaatcttaaggaaactcagatacaagagaacatagatagacatttcaaatacattgggaagataatttatgatctgtatgagaaattgaacaaagagatagatatcattaaaaagaaccaaacaaacttccacttgagcagcctgagacatccatgggtgggggtattttctccctcaactgttcctaccacaggcttcctgaggtttttcctagtgaggccaagagggtctttgaggaaaactgcatccagacatgccttgagggaaggtgtcaaatgcaggagcatggaaaagagttacaatttggatatgaaaccatttttctagcccaccttagagaagactgttgacacactggtcaaaatggttccaatcgcctaccttgcaagacacttcaggttcaaagaatttcccttgtaaaagcaacaagggagttgtcagagttttccatttagatcaacaaattcaagttcttaccatggaaaattcagagaagactgtagtggttctccttgcttgtggctccttcaatcctgtcaccaacatgcacctcaggttgtttgaactagccaaggactgcatgaattgaacaggaagatagagagttgtcgaaggcataatctctcctgttggtgatgcatacaagaagaagggactcatgcctgcccatcaccaggtcatcatggcagaacttgccaccaagaattccaaattggtggaagttgatacatggaaaaattttcagaaggagtggatagaggctgttaagatgctaagatactatcaagataaactggaggctagtgactgtgatcaacagcagaactcacctacactagaaaggcctggacgaaagaggaattccatgagctgaacaaagacaagcttctagtcaaaagagatccctagagccaaaaacaaaaggtgcaccaaaagtcaagctgctgtgtggggcagatttactggagtcctttggtgttcccaatttctggaagagtgaagacatcacccaaatcatggcagactatgggctcatatgcattactcaagctggaaatgctgctcagaaattcatctatgaatctgatgtgctatggaaacactggagcaacattcatgtggtgaatgaatggatcactaatgatatctcatccacaaaaatctgaagagccctcagaaggggccagagcatccactacttggtactagatcttgtccaagaatacatcgaaaagcataatttgtacagctccaagagtgaagacactccgagagtgaagacagtgaagacagctccgaaagtgaatgacaggggccatcctggccactttacagagaaacactgcagaagctaaggcatagaaattctgcagcatgatgttttgcactttcctttcagggtttgaaacaatctgggtgttaataactgggaaaagaaattgtggtcctgttgcataaactaaagattaaaagtttagtaaaaatcagtggtaagttaaaatcagggtttttttttttttctttttatcagaagttgctaagatgaatgttttccatatggtctttttctaaaaaaaaaaaaaaaatgtacaattctctttatctttaaaccaagagcttagcagcacacaaaaaccagaagaattttcagtgaaactagctacaaataagaaatcaaaaagtacagcctagctctaccacataaaagaagcaaagtgtgaaaagcaaaagttcacttaaaattctaatttaggttatgaagagaattgacattttatgcatgcctgctgtgggtaatctgcagctagggtagacaaaggaaggaattcttatagtggtgatcttgtaaaatgcaccattgataaatcatctccagttatgcaaaataaaggttgtgcatatgcctggcagaaacattgtaccaatagttagttctctgtggcacacatcacaattgctgactaaagtttggcaagacctatcggcctggagcttcctctttagaagtaggaagtgaagtccaagccctcatatgtttagaaaagtatgcaagttttctgatgcctaccagaggtagagacctgctgccttatactttatacacagttacttttccttgttatgggtcatgctctagccttggtcatccaccctctctttatcttcagaaacaatttcagagttgacatcatgttaccttgaagtgagagaaccacagagaatgagaagtctattcaaggattttatgtctgaatgctcttagcctttattgatagcttaatcagaagatctaagtggggtgcagtggcacatgctctgtagtcccatctacctgagaggctggagcagaaggatcgcttgagcccaggagtttgacaccagcctgggcaaaatagtgagaactcattttttaaaactgtgaagtttctgaagggccctgctgtttctgttccagccaactgtgaatctgccatttgtgaatttaagcagaaaaagggtctgttttctcatatttttttcttcttgcccttttgtatgaagtttaacctaaagtagtattctcaaataattagtcatagcttcatgttaaaaacacatgcttgttacatggttttccactgattaaaattttgtggaaatttcaccaattgctaaagcagaaagaccagaaatagctttttatagaatcgttttggggtttgcgaaaattgtcctatgacagaaacaggactaaagttaaatttctaatgaaaacataataatttgcctttttgcaatttctatttcattcctacacaaacccagatgaagggtttgtaactccagaagaaaaaaaatacttagatatgtgcaattgtatagtcagatctgaatctacagtttaaaaaataaaaatgttaaataaagttaagcaaacatatgtgcttcagctcccaacttactcttactaaagccttcgggccaattcccaaaaaacagggagggtgcaaagcctgacacctagcagctttcaggatccatctgccaagtgaatgaaaggttggaatctcaaatcctacagataagagtcatttttctcctcctcagcttcttggagtttaagagttgaagcggccctgaaaagtaatgattgagcatgaagaagctataagaattgaactttgataccttctgggaaataatacacagtttatctgaagtgttgtgtaaactgcagaaaggttccaatgctagaaaattctctcatactgtcatgccttcccacttagaagtgcccatgccctgctcagctgtgactctactgacctcaggacctcactggacaagtcatgtggtaacccttgcaggagacctgataatggtgaaatgattctattgttatattatttatggagcaacaactttgtacagagaacgagctgcttggctttttcttccaatgccgaggatgctgctgatgctgccatgtaacagcatacttttgggtgtcctcaaggatagaacttcccctctgaataatggaaattagaacaatgaacttcacaggggaataaatattaattactgatgtgaagaaaatattccattgtttattccctaccacatcatttccataattggctgttgtactgtgaatttagaggaaatgggtaatgcttgtgttttgttttgcttctttgtttgatgctgggggttttatgtgttgtacactttaccccttacattgcataatttgaatgcagcaaacaaacccgcaataaaagtcatttattggcatcttcattcagatgaatggagagcctttgtggtagtgtcaaaaaaaataaaaataaataaaaataaaaagaaccaaacagaaattttggagctgaaaaatttaaccaataaaatgaagaaatacaattcagagcttcaatagcagactaaattaagcagaagacaaaaatttgtgaacttaaagacaggtcttttcaaataacctagtcagagatccaaaagaaaaaagaataaaaagaacaaccaaggccagctggacttctgggacaccaactaagcaaacaaatatttgcattatgggatttccataggacaaagatgaagagagacacagaaaggttacttaaaaaaacaacagttaaaaacttcccacgtctttggagagatatgtacatccagctccatgaagcacaaaggatcccaaacagattcaacccaaagaggttctctccaaagcacattttaatcaaatcatcaaaagttaaagacagaattccaaaagcagtgagagaagagaatcaagttacatataagggaatccccactagactatcagcagatttctcaacaaaaactgcaggccaagaaagaaccagataataaatttgaagtgcttaaagaggtgaggtgggggtgcgggggaactgtctacctagaatactacacccagaaaatttatacttcagaaatgaaggagaaatagtgtttctaggcaagagaaagctgaggtaatccatcactgctagaccagccatataagaaatgctagagagaatgcttcaactggatgtattaggaaaataattactagtatgaaaaaaagaaagtataatctcattggtaggagtaaatttattatcaaatttagaatactccattactgtagtggtggtatataaactttcagttgtctagtttgaagattaaaagtcaaaatggtcaatgattactatagctacaacaagttgttaaaatacgtacaggatatgaaaggatacaaagtaagcaacaaagttataaatttggtgggggaggccaggtgcagtagctcatgcctgtaatcccaacactttgggaggccgaggtgggtggatcacctgaggtcagaagtttgagaccagcctggccaaaatggtgaaaccccatctctactaaaaatacaaaaattagctgggtgtggtggtgtgtgcctgcagtcccaggtactcaggaggctgaggcaggagaattgcttgaacccgggagacgaggttgcagtgagccaagattgcaccattgtactctagcccaggcaacaaagcaagactcagtctcaaaaaaaaaatgtttttaataaaaaataaacaaatttgggaggtagaaggtaagtctagaatacttgcatgtagccaaagttaagttattatcaacttaaattgcctattataactacacagtttttaaaatgtaagccccatggtaaccacaaagaaaaaaattacggcagatacacaatgaaaaagaaaaaaaaaatcaaagtttatcactacaaaaaaaatcaccaaaccacacaggtaaactataagagagggaaaaaggaacaaaggaaatacaaaacaaacaaacaaacaaacaaacaaaaaacagaaaatgatctaacaaaatgtcaagagtaagttcttacctatcaataataaccttgaatgtaaatgaattaaattttccaattaaaagatatagagtggctgaatgggtagaagacaaaacccaactatatgctacctacaagagatttgctttacccataaggacacacgtagactgaaagcgaagggatgaaaaatgatattcaatgcaaatggaagccaaaagactacaagagtagctatacttagataacagataattcaaaaattgaaaggggagacaaagaaggtaaatctatactaaaggggtcaattagcaaccaattaaaacaattctaaatagatatgcacccaacactagagcatatataaagcaaatattataacatctaaagagtgatacagactgcaatacaataatagtaggagatttcaacaccctactttcagcaatagatagatcatccaaactgaaaatcagcaaaaaaaaaaacactggatttatactgcactctagaccaaatggacctaacagatatttgcagaacatttcacccaccagcaacctacagaatacacatttttctcaaaagtacattgaattttctccagaatagattatatgttaggccacaaaacaagtctcaacaaatttttaaaaatcaaaagcatattaagtatttttctgatcacaatggaataaaattagaaactgataagaggaagaattttggaaatcgtgcaaatacatggaaattaaacaacatgctcctggaacaaccaatgggccaatcaaaatatttaaaatgaaaatttaaaatttcttgaaacaaatgaaaatggaaacacaacacacctcaatctatgggatatagcaacagcagttctaagagggaagtttatagcaataaacacctacatcaaaaaaatagaaagatatcaaataaacaacctaacattgtacctcaaggaagtaaaaaaagaaaaaaaaaagaacaagctaaatttaaaattaagaatgaagggaataataaagatcagagcagaaataagtgaaatagaggctaaaaaatagaaaacatcaatgaaacaaagaattattttttaaaaagataaactaaattgacaaacctttcgctagacaaagaaaaaagagataatacacagataaataaaatcagagattaaaaagaagccattatacctgataccacagaaatacagagaatcataagagacaattatgttgtgcacatgtaccctagaacttaaagtataataaaaaataaatatatatatattaaaaataaataaaaagaaatagaaaaaataaaaaaaagaaaatctagaagacatggatattttcctggacacatataacctaccaaaattgataatagaaaatatgaacagatcaataatgagtaacaagattcaatcagtaataaaaatttccgatcacagaaaaccatgggacctgatggcttcattgctgaattctactgaatatttaaagaataattaataccaattcttttgaaactattccaaaaaactgaagaggagataagttcatctaaattcattctatgaggccagcattaccctgatacaaaaacaagacaaggacacaacaaagaaagaaaactacaggcaaaaatcctcaacaaaatacaagcaaacaaaattcaacagcaaattaaaaagagagttcaccatgaccaactgggagatggaaggatgattcatcatatacaaatcaataagcatcatacatcacattaataaaatcaatgacaaaactgatgcaaaaaaagcatttgataaaatttaaaattccttcaggataaaatctctcaacaaattaggtatagaaggaacataccttaacatgataaaggccaaatatgataattccacagctaacatcatactgaacacggaaaagttcaaatcttctcctctaagatctggaacaagacaagcatgcccactttcaacactttcatctacccagagcaattaggaaagagaaagaaataaagggtatccaaatggaaaaggaggaactcaaactgtccctgttttcatataacataattttatatattaaaaaaaccctaaagactccaccataaaactattagaactaataaacaaatttagtaaagttgcaggatacaaaatcaacatacaaaaatcagtagcacttctatgtgccaataaaaaactatctgaaaaataaaccaaaaaagcaatcccacttacaacagttacaaaaaaaagatacttagcaataaatttaaccaagaaggtgaaaaatttctacaatgggaattataaaatgttgatgatgaaattgaagaggacacaagtaaatggataaagatatcttgagttcattgattagaaaaattaatattaaaatgtccatactactcccaaaagatctacagattcaatgaaatccttatcaaaattccaatgacagtttttcaaagaaatagaaaaaaccctaaattcgtatgaagccacaaaacatcttgaatatccaaagcaattttgagtaaaaagaacaaagctgacggcattgtactagctgacttcaagataaactacaaagctatagtaaccaaaacagcatggtactggcattaaaatagacacatagaccaatggaacagaagagagatcacagaaataaatccacgcacttaaagccaattgattttcaacaaacatgccatgaatacacattggggaaagaagagtctcttcaaaaaatggttctgggaaaactggatatccacaagcagaagaatgaaagtagaccccgtctttcatcatatacaaaaaatcaaatcaatattgactagaagcttaaatcaacactaatgataaaattactagaataaaacatagggaaatccctttatgacactggcctaggcaaagatttttttgataacatctgaaaagcataggcaacaaaagcaaaaattgataaatgggattacatcaaactaaaaacttctgcacagcaaagtcaacaattaacaaagtggagagacgacatacagaatgggagaaaatatttgcaaagcatacatctgataaagggttaatatacagaatacaaaagaaacccaaacaactcagcaaaaaaacaaatacagtcatgttccacataacattttggtcaatgataaatgggatctaagtaaactaaagagctttggcacagcaaaagtaactatcaacagagtaaacagacaacctacagaatgggagaaaatttttgcaaattatgtatctgacaaaggtctaatatccagcatctataaggaacttaaacaaatttacaggaaaacaacaaacaacctcattaaaaagtgggcaaaggacatggacaaacacttctcaaaataagatacatccagccaatgatcatatgaaaaaaggctcaacatcactgatcattaaagaaatggaaattaaaaccacaatgagataccatctcagaccagtcagaatagctattattaaaaagtaaaaaaataacagatgctggtgaggttgtagagaaaaaggaatgcttttacactgttggtgggggtgtaaattagttcagccattgtggaagaaggcgtggcgatttctcaaaaacctaaagacagaaataccattcaacccagcaatcccattactcattactaggtatatacccaaagtaatataaattattctcttataaagacatggcacacatatgttcattgcagcactattcacaataccaaagacatggaatcaacctaaatgttcatcaatgatagaatggataaaaaaatgtgttacatatacaccatggaatactatgcagccataaaaaagaacgagatcatgtcctttgcagggacatggatgaagctaggggcaattatccttagcaaacaaatgcaggtacagaaaaccaaatacagcatgtcctcagttataagtgggaactaaataatgagaacacatggacacacagaggggaacaaaacacactggggcctattgaagggtggaaggtgggaggagggagaggatcaggaaaaacaactaatggatattaggcctaataactgggtgatgaaataatctgtacaacaaacccccaggacacaagtttacctatggaacaaacctgcacttgtacccctgaacttaaaagttaaagaaaaattttggtcaatgatagcatatataaaagtgattcaataagatcataatattgtattttttgtgccttttctatggttagatatgcttaggtacacagatatttaccatcatgttacaactgtctacagttttcagtacagtaatatactatacaggtttctagcctaggagcaataagctatacaatctaggtctatgtaagtacattctgtgatgttcacacaataacaacattgcgttgtaatgcatttttcagaatatattccaacccttaaatgatgcatgactgtaatctgattttaaaatgggcaaaagacctaaatagacatttctgaaatggccaacaggtatatgaaaatatgcttaacattaccaatcatcagaggaatataaataaaagtcacaatgagatatcaccttgccccaattagaatgggtattctcaaaataccaaaaaatgacaaatgctagtatagatgtggagaaaagagaactctcatacacttttggtggtaaattaggacagccattatggaaaacagtatgaagtttcctcaaaaaattaaaactagaactattatgtgatccagcaagctcactattgtgtatatgttcaaaggaaatgaaatcagtatgtcaaagagatatctgcactctcatgtttattgcagcactattcacaaaagccaagatatggaatcagcctaagtgttcatcaagagatgaataaagaaaatgtcacaaatatacacaatggaattatatttagccataaaaaatgaaggaaatcttgtcatttggggtaatatggattaatctagaggatgtgatgttaagtgaaataagacagaaagagaaaaacaaatactgtatgatcttactcatatgtgaaatctaaaaaagttgacatcatagaagtagagtgtagggaagtggtgaccacaggcagaagagtgtaggggtaagaggaggatggggagagattagtcaatgggtacaaagttacagttagataagagaaataagttctgtgttctgttgtacagtagggtgactatagttaacgacattgcattgtatatttcaaaatagctaggatagagtgttttcaatgttctcacaacaaagaaatgataaatgtataaggtaattgatatgctaaatgccctgatttggtcattacacaactatacatgtactgaaacttcaccctgtacctgataaatatgtacaattataatgtgtcagtaaaaaacaaaacaaacataagagccgtatataaaaaacccacagccaatatcatactgaatgggcaaaagctggaaataattcccttgaaaactggcacaagacaaggatgccctctctcaccactcctattcaacatagcattggaagttctagggcacgcaggcaagagaaagaaataaagagtattcagattcaaagagaagaagtcaaattatctttgtttgtagataacatgatcctatatctagaaaaccccatagtttcagcccaaaagcttcttaagctgataagcaacttcagcaaattctcaggatataaaatcaatattcaaaaatcactagcattcctgtacacaaacaacaggcaagcagagagccaaatcacgaatgaactcccattcacaactgctacaaaaagaataaaatacctaagaatacagctaaccagggaggtgtaaagtctctacaaggagaactacaaaccactgctcaaagaaatcagaggacataaacaaatggaaaaacattccatgctcatggatagaaagaatcaatattgtgaaaatggtcatactgcccaaagtaatttatagattcaatgctattcccattaaactaccattgacatgctacacagaattagaaaaaactattttaaaattaatatgaaaccaaacagagcccaaatagccaagacaatcctaagcaaaaagaacaaagctggaggcatcatgctacctaacttcaaactacacaacaaggctacagtaatgaaaacagcatggtactgggacaagaacagacacatagaccaatggaacagaaaaaaagaactcggaaacaagtccacacacttacaaacatctgatcttcaacaaacttggcaaaaacaagcaatggggaaatgattccctatttaataaatggtgctgagagtcctggctagccatatgcagaaaactgaaactggaccccttccttacaccatatacaaaaattaactcgagatggattaaagacttaaatgtaaaatccaaaactataaaaatcctagaagaaaatctaggcaataccattcaggacatatgcacaggcaaagatttcatgataaaaacaccgaaagcaattacaacaaaagcaaaaattgacaaatgggatctaattaaagtaaagagcttctgcacagcaaaagaaactatcatcagagtgaacagacaaccaacagaatgggagaaaagttttggaatgtattcatctgacaaaggtctaatatccagaatctacaaggaacttaaatttacaaaaaacaaacaacctcattaaaaaatgggcaaaggacaggaatggacacttcataaaagaagacatacatgggaccaacaatcatacgaaaaaaaggtcaacatcactgatcattagaaaaacccaaatcaaaaccactatgaggccgggacagtggctcatgcctgtaatcccaaaactttgggaggccaaggtgggcggatcacgaggtcaggagattgagactatcctggctaacacggtgaaaccccttctctactaaaaacacaaaaaattatccaggtgtggtggcatgtgcctgcagtcccagctacttgggaggctgaggcaggagacttgcttgaacctgggaggcggaggttgcagtgagccgagattgcgccactgcactccagcctgggcgacagagcaagactctgtctcaaaaaaaaaaaaaaaaacacacacacacatgcacaatgagataccatcttacaccagttcagaatggctattactaaaaagtcaaaaaacaacagatgctggcgagattgcagagaaaaaaagaatgctatacactgtcggtgagagtgtaagttagttcaactattgtggaagactgtgtggtgattcctcaacaatgtagaggcagaaacactatttgacccagcaatcccattacttagcatatacccaaagtagtataaatcattctattacaaagatatgcacacatatattcactacagcactattcacaatagcaaagacgtagaatcaacctaaatgcccatcaatgacagactgaataaagaaaatgtggtacatacacaccatggaatactatgcggccataaaaaggaatgagatcatgtcctttgcagggacatggatggagttggaagatactatcctcatcaaactgatgcaggaagagaaaaccaaacaccacatgttctcacttataagtaggagctgaaagatgaaaaaagagctgggcttatgtccatgtctggttttggtaacagagtaatgttggccttgtacaatgcattagggagaattgccacctcttcaatttttagaaacactttgggaagattggtattagttctttatacatttggtagaattccacagtgaacccatctgatcctgggcttttcttcaatgaaagaattattatttattttaagttctgggatacacgtgtagaacgtgcaggtttgttgcataggtaaatgggtgccatggtggtttgctgcacctatcaacccgtcagctaggtattaagcccagcatcaattagctattcttcctcatgctctccctcccatggcccccaacaggctccagtgtacatcgttccccctcacgtgtccatgtgttctcatcattcagctcccacttggttttttttcatcatcactgctgtttcaatgaaaacataaattcaaaccaatttcacatttactgaataattatggaagctagaaacccacagggtaattacacaaatacaaaatacctacctaaataatatcggacatatactgggtattttggttacctacagctacataagtatttactgtaaaatataaaagtttaaaacaactaccaatttaacatctctaatgatagtgtatatcaggaattggggtaagagatagctgaatcattctcatggcatcatcagagtttactcactggtattcagatgacaaatgggcttttctggagagtccaagatggcattattcacttgtctgctgccttgataaggatggctgaatgctagtctcaggtggaactttgctgcaaggcttcctctaatgtaacctcaaaatttcagaacacacttctgccacattctataatcaagcaaatgatcaaagccagcccagattcccaaagagggaaattggtggccatgtttttacttccataatcagggagaagggcaggaaatatgatccagaacaaacagaaaaatgagttagtagcagcagacacagaatgacagagatgatggaattaacaagaaatgacattaaaacatctattataagtcttctaaacaacctcaaaaaaataaaagaatgcataatcatagtgagaaaaatggaagacataaagaagacctgaaaggaacttctaaagttaaaaatatataaaatgaaaataactggatgagattaacatcagtgaatactacagaagaggaaaaaaatagaacttaaagacttaacaatagaaactagccaaaattaagcccagagaggggaaaaaaatataaaaaaaaaacaaaaaaattgagtgcatcaattacccatatgacaatatcaagtgatctatcttgtgatctatcttatacgtaattggagttccagaaggaaatgagagagaaaaaaacataaagaaaaattttaatgcaacaataatcatatattttccaaatttgataaaaactctaaccccataaattcaagaacctctcaatgaatctcaggaagaataaatataaagaaaatgataccaggacatatcataatcaaactgctgaaaacaagtgataaagagagtatcttaaaagtagccagatttaaaaaatacaaattacctacaaaggaatgaaggttaaaagggaaacaggcttattgtcagaaacttcacaggctggaatacaacagaataacatcattaaagtattggaaaaaacctgtctacatataatggtatatccagtaaaagtgtcttcccatattaaaagtaaaaatacttcctcagataagcaaaagttgagcgaagtcatttccaccagacctgtactaaaaacaaaacacattaaaggaagttcttcaagacagaaagaaaatagaaatttggatctacataaatgaaagaaagaaacaggcatagtgggtagaaaatatgtggttttaaatcaatgtataataattgaaacacacatactgaaaggaaaattaatgcaggagtgttgacacctgaaatgcaaatcaagaatgggaagaactcgctttttggccgtttttcaaataaaattatttttttcctcataaacaacagcacaaacaacggacaccaatacacacacacacacccctcccccaaaatgtttgactatggtattccatatgtctgagtagaatatataggtgataaacatatacatactatttttgaatgcctagcccattgctctgactggattgaaaatgccttaagacaattaggtgttttctccttgaataaaattcactgacaacactttgaaattgtaacgatagatggtgaatttatgaactgccaaaaggcatgtgaaaaccaagaaaaacagttaccctgtgctaaagcccacattgccatttgttaaggacagctcctttccagaacactggacagatgacacatgtttgttcattggctctttttttttttttttttgagacagtcttgctctgtcgcccaggctggagtgcagtggcacgatctcagctcattgcaagctctgccattctcctgcctcagcctcccgagtagctgggactacaggtgcccaccaccatgccctgctaatttttcgtatttttagttgagaccgggtttcaccgtgttagccaggatggtctcgatctcctgacctcatgatccacccacctcagcctcccaaagtgctgggattacaggtgtgagccaccgcgcccggcctgttcattggcttttatatagaagtattaactgaatgcctgctatgtttatggacaacattgtagctaagaccccatatattataattcctgacattcactcaggactttgcaatagatagctcgcttttatatctaccttgctttctcttcataacaataaatgaggagggtggatattattatccctttttcagttgaggttaagaaagccctgactcccaactcatcaccctacttccttcactaaagctgtaatatcctttagactctgtcataaacagaagccttcaggtctcagctgaattcagttttttcatggggacttctcatatacagcagatcttccaataaggtcgttttgttataatgttgatgaaaaaaaacattgattcctggccgggatcactgtccatgggaagttcacacattcttcctatatctacatgggctttcttctgttattattaatatggtttccttccacatcccaaagatgggcatactaggttcgttggcctgtctaaatggtctcaatctgatgagtgcaggggtgtatgtgcgagtgtgtcctgtaatggaatgatgtcaaaggctggttcctactttgctccaagctgccaggatgggctctggccaccagtgaccctgagctggaataagcaggttggaaaatgaatgaatgaataaatacaagttattataaaataaaaaatttttaagtacatgataatcatacaataaacaatgcagtatgaaagcgcttagtgagattactatatttgttgtttgtttctgaactgcgtgatggtaggaggtgcttctgacaatgttcattttgcaaacatttattctttgattgaatctaccaccatgattgccctcactctctgattcaccgaaaattgagtaaatcattatcttgtttttatttttctttcttaaatgtatatatagttcacatttatttcaatgtttaatagtataagtgttttggtctttatttagaagtttggtgatgtttttgtgaccagaaatatgccacaggaatttaactcttgtttatatccattatcctatgataaaattggttttgttatacatcattttcttaaaattgtagtttccaagaacctaaccaggacattaagtgagaatgtactgtactcacgtaggtcttgtattatttcttcatagcatatagttattaaagtgagattttaaaaaaaatgtttggctcccacattggtctcagcttcaggcaggcagaagctttgactctaccatagcaaccccagcactctgaataatgcctggagcatggtaggcactcaatatatgtggtctactaaatgtgtgttggttcctgaaatgcttctagatcaaaactgcatagcaaaggaaggaatctgtctatggttatgtagtttcagaataccatatctatatgtactttataatgaaaagcttgcaggaaaattggctattattactttattaaatgaatttgagtcactcatcctttcttcagattattcatccataaaataacaatgtttgaaaaccatataggtattaaacagtgctcctcaaagcccagatggttctgtgagggttgaggaagagcaaagagatacatttaagtttttttcttttatttacataccaagtaaaagcactacacatattaaatggcagtccaaggctaggtttggttctgtgtccctacccaagtctcatcttgaattgtaatccccacgtgtcaagggagagatctggtgtgaggtgattggatcacagggacggtttcccccatgctattcttggtatagtgagttctcacaagagctgttggtttttaaagtattcggcagttcaccctttgctctctctctcctgccgccatgaagaaggtgcttgtttgcccttcaccttctgctaccttctgccatgattgtgtttcctgaggcctcccaagccatgcagaactgtgagtcaattacccagtctcaggtatttatttatagcagtacaaaaacagactaacacagtttataataaaatgttcccagtaatattgaaggagcactataatgctccctaagaacttagaaacaaatgaaatcaagtaaatttttaaagtaacatacaatggatcataataaagacatataaaatctcttaagggaaacagaataacaccctacaatacgaagaaaacatccatcaggcaggagattgatcagcaataaagccaaaggaaaagtggagtcagagatgagaactctggaaattcccaaccggtctatgtccaggagaaaggaaagttaaatcagtgttcagaccttcaggcaaggtcattttttgtatgaaacaacaatactatgctctcttagcctgagaacattttttaaaatggattcatctcctgttttgattgatttcatgatttcaggcaaacttctgaatatttcatggttccctaaaatagtctgctgagaagaaaaattgctcataccatcacgaatattcagacccatgtgacagttgtatttctcatcatcaataaattggcaaactgatttatgtttttgtttaaaacacctagttagtgttcactatgttcctaacattgttataagtgcttcaaataataatttattacatcttcatagcaactccatgtggtaggtacaatcctataaagataataatagtaaagtaatgcactttttctgttaaaaactatttttaattgacaaataattatatctatttatggggtacagtaggatattttgatatatgcatacattgtgggatgatcaaatcaggctaattaacatgtacaccaccttacgtatttctttgtgatgagaacacttaaaatccacccttttttcaattttgaaagatttgggagattttatgggtcctttccaaaccatcacaataaagtaagtcgcacaattttattttgttttctggtgcatataaaattatgtttacactacatggtgtagtctaccagtgctaagatttctctgtagcatgcaatgctgtttgatagcattttacatgcagtggaatttctttcaaaattggagtcaatcttctcataccctgcttctgctttatcaactaagtttatgtaatattctaaatttctttgttgtcatttaaacaatacgcacagcatcttcacctggactagattccatttcaagaaaccactttctttgctcattcataagaagcaactccttatcgaataaagtttcatgatgagattgcagcaattcagtcacatttcaggctctacttctaactctagttctcttgctattttcaccacatccgtagttacttcctccactgaagtttttaacccctcaaaattatccatagaagttggaattaacttcctccaaactcctgttaatgttgaaattttgaccttctcccatggattacaaatgttcttaatggtatctagaatgatgactcttttccagaaagctttaaatttaccttgtcttggtaactgtgaatactgctgcagtgaatgtggagtgcagacgtttcttcagcttactgatttttattcctttgggtggcatagctggatcatatggtatttctacttttagttttttaaataaccttcatactttttccaaaatagttgtactaattcacatttccacaacacagtgtgtgatggttcccttttctctacatccttgccaacactagctagcattcacctttttgatgacagccatacttacaggtgcagggtgatgtctcattgtggtttaatttgcatttccctgttgagtagtgatgttgagcatttttaactatatctgttggccatttatatgtcttcttctgagaagtgtctatccatgtcatttgcccatttttaatacgagtatatgttttattgagtcatttgagttccttatatatttttgatatgagtcccttatcaaaatgaggccctttgacaatatatttgcaaatattttctcccaatctgcaggttttcttttcactctgttgatggcttcctttgccatgcaaaagattttttagtttgatgcaatcccaattgtctaattttgcttttgttgcctctgctttgggggacatacccatgaaataattgcccagaccaatgtcaaggagcttttctcctagtcttctcttatgagttttacagtttcagatcttacatttaagagtctcacccatcttgagttgattctactatcaagggagagataaagttccaattttatttttctgcatgtggatagccactttttctaacaccatttattgaagagactgttctttcctcattgtgtgttcttggcacctttgttgaaaatcaattgaccacagatatgtgcgtttatctggggactctctaccctattcgattcattgatgtgtctgtttttatggcagtaccctgcagttttggttactataactttgtgatgtattttgcaatcaggtagtttaacgccttaacctttgttatttttgctcgagattgctttggttattcagggtctattgtggctccatacaaattttaaggttgttctatttctgtgaaaaatgacattggaattttgataggattgcactgaatctggagatcactttgggtagtatagacattttaacaatattaattcttccaattcatgaacacagaatatctttccatttctttgtgtcttcaatttcttttatcaatgttttatagttttcagtgtataggttcttctcctccttggttaaatttactccagagtatcttattttttatagctattgcaaatggaattgttttcttaatttttttcagatagttcattgttaccatatagaaacactattaaattttgtatgttgattttgtaacctactttactgaattttattcatcagttctaacaaatttagggggctgagggaggggagagggagagggagagagatttgtactgtactgtaaagaattggttcacatgattatggaggctaagaggctcaagagaagcagttggaaaactgaagacccaggagagccaaaggtatagtatcagtcaaagttgaaagtcctgagaaccaagagagctgatggtataaattctggtttgaatccaatggcctgagaaccaggagagcctgtggtgtagaatttagtccaagtctgaaagcaaagaaaattgatatcccagcttaaagacaagcagagataaataatttttcttactgagccttcaattgattggatgaggcccattcacattgggaagggcaagctgctttattgagtttaccaattcaaatgtcaatctcatccagaaacatcctcacagacacaacacgaaataatgtttaagcaaatatcttcatatcccatgacccaatcaagctaacacataaaattaagcattatacttgtgtacacaaatagacatttttaacttagctgtgcatttctccaaatcctttagcaaattacaaataccaatcaagaatgctgacggaaacatacctacttgtgtgactacaagttaaaacactgataacaccaggtgttggtgaggatgtagagttgactggaactcctatagatcactggtatgagtgaacatgttacaatcactttggaaactggaagtttttgtgatagttaagtatacacttacctatgatccataaatcatattcctagatatttacccaagagcaatgagtatgtgtgtccataaaatgatttgtacatggatgttcttcatagcagctttcttcataatagccccaaactagaaacaaccatcaactggagaatgaacaaaaaaatgcatattcataattagcaataaaaatcactactgatacatgtaataacatagatttgtctcagaaacattatgttgaataaaagaagcaaggcagaaaagtggctaatttttgattatttatgtgaagttaataaacaagaaatctgtgatgatagaagtcagaatagtagttatcctatagaagagcaggattgctgatatagtttgactgtgtccccactcaaatctcatcttgaattcccacatgttgtgggagggacctggtgggaaataattgagtcatgagagcaggtctttcctgtgctgtcttcatgatagtgaataagtctcacaagatctgatggttttaaaaacaggagtttcccttcacaagttgtctttctttgcctgctgccatccatgtaagatgtgacttgctcctccttgccttccgccatgattgtgaggcctcttcagccatgtgaactgcaagtccattaaacctctttttcttcccagtcttgggtatgtctttattagcagtgtgaaaatggattaatacagtaaattggtactgggaatgggttgctgctgaaaagatacctgaaatgtggaagcgactttggaactgggtaacaggcagaggctagagcagtttcgagggctcagaagaaaacaggaaaatgtgggaaagtttggaacttcctagagacttgttgaatgctttgaccaaaatgctgacaatgacatggacaatgaaatctaggctgagatggtctcagatggagatgaggaacttgttgggaactggagcaaaggtgactcttgttatgttttagcaaagagactggcagcattttgcccttgccctggagatttgtggaactttgaacttgagagagatgattagggtatatatatctctatatatctggtggaagaaatttctaagcatcaaagcattcaagatgtgacttgggtgctgttaaaggcattcagttttaaaaaggaaaccaagcataaaagttcaaaaaattcacagcctgacaatgcaacagaaaagaaaatcccattttctgaggagaaattcaagccagctgcagaaaattgcataagtaatgaggagctgaatgttaatccccaagacaatgggaaaaatgtctccagggcatgtcagacaactttgtggcagcccctttcatcacagacatagaggcctaggaggaaaaaatggcatggtgggctgggcctaggttccctctgctgtgtgcactctagggacttagtaacctgcatcccagctgctccagctgtgactaaaaggggccaagatacagctcagaccatggcttcagaggatgcaagccccaagccttggcagcttccacatggtatagagcctgtgggtacacagaagtcaagaattgaggtttgggaacctcctcttagatttcaaaggatatatggaaatgcctggatgtccaggcagaagtttgctgcaggggtgaggcactcatgaagaatctctgctaaggcagtgcagaagggaaatttggggtgggcacccccacacagagtcctcactgaggtactgcctagtggaactgtgagaagagggccaccatcctccagaccccggaatggtagatccacagaccacttgcaccatgcacctggaaaatctacagacactcaacactagcccatgaaagcagctgagagggaggctgtaccctgtaaagccacaggggcagagctgtccaacaccatgggaactcaacccttgcatcagtgtgacctggatgtgagacatggagtcaaaggagatcgttttggagctttaacatttgactgtcctgctgtatttcagacttgctgactttttggacttgtagcccctttgttttggccaatttctcccatttggaatggctgtatttacccaatacttgtatctgcattgtatctaggaagtaactagcttgcttttgattttacaggctcataggttgaagggacttgccttgtctcagatgagactttggactgtggacttttgagttaatgctgaaatgagttaagactttgggagactgttggggaggcatgattggttttgaaacataaggacatgagatttgggaggagccagggtggaatgatatggtttggctgtgtccccacccaaatcttgagttcccacatgttgtgggagggactcagtgggaggaaattgaatcatgggagcaggtctttcctgtgctgttctcatgatagtgaataagcctcatgaaatccgatgattttaaagatgggagtttccctgcacaagctctctctcattacctgctgccatccatgtaagacatgacttgctcctccttgacttctgccatgattatgaggcttccttagccacatggtactgtaagtccattaaacctctttttcttcgcagtctcgggtatgtctttatcagtagcgtgaaaatgaactaatacaattcctgattggaaaactacacaggaaactttcgggatgatggaaatattttatattttgatccaggccctggtctcatgggtttatgtgtacatatatgcatacatatatgtaaagtataagtatacttatatacaccgaagtatataaatatgcattgtagacttgtgcatctcactgggcgtaaagtatgccttaataaagaactgtgaaaaatagcttcaatacaaaaaattatgctaaataatgaaatgaaaccaaatttaatattttcaacaatttggagacctaaaccaatacttgtgaatagacaactctctcccagatggcctaagctgagcaatttccataagtcaaacttatcaagctattgcttgagtttctggggttcagatcacacacaaaaaaagcccaaatcaaaactctgtttgaccctacataataactcacaaatccacttggattctggccagtatgccattctatttcagctgcagtgtcacaccttgcattgtagacatcatatcacctgatatttttgtatcatttgtaaataatttagcagcaacactgactaaaatttactataccacccaaaatacaaaacacaagagaatgacaagttaaaattattttattttaaaaaatagtctatatgcaaatagtcccaagtgtttaactgcatgatccttgtgggtctacacccctgattttaaatcctatgcttgctgtattctttcacagtttgccacagagtattttcttaatgcacaacagtaaaacaaattcaccaatgaaaatttattcttggctgggtgcagtggctcacacctgtaatcccagcactttgggaggccaaggcaggtggattacttgaggtcaggagtttgagaccagcctggtcaacatggtgaaaccccgtctctactgaaaaaacaaaaattagctgggtgtggtggtgggtgcctgtaataccagctactcaggaggctgaggcaggagaatcgcttgaaccccagaggcagaggttgcagtgagccaagattgcaccactgtgctccagcctgggtgacaagagtgaaactccatctcaaaaagaaaaaagaaaagaaaaaaggatttattctcaccaaaataagaacacaaggcaagtgataaatgtcacattaaattgtattaatattgcctaatttgtaatccacaacttcacaatataaaaaatatggattatttttaccaattccctctttttctactatgaatactttctatactcacatagaatagttcagtgaaatatacttggtacacctcagtgaaatactggctgattgattgacacaggtggttaatacaagaggcccttaagatgaagatgacattgatattatacaaacacgcagaatcacaaaatactctcagcctgtttgccaggaggcaaataggacacacaagtgggaagtttggtgtttctggaccacacagtctctgccacggcaaagaagatcagccagcctcctcaactcagtacaattcagacatggtcatgaggtaggggctatagtgagaaatgtgttagaacccacacctatatatgcacatatgcaacacaagctatgtgtttaagattccagaaactgtgtaagaaacaagatgttggaatgttgattggatttacatgttgatgaaatttcagtcaactaagcctagtatcatgcaagattactgtgaaaagtttaattgtaccaactgctcttgtttggaacaaagaactgtcagctctctttacattaaccatatttctctcccccattgctactgcaagaaccaaaaagagagtacttaaaactgggttctacctgcaaaatctgcaagtcagtcagtcatggtttacatgcatgtcaatttctacattatattttcctaaggcagacatttgacagatataaatcttgcctcagcaaggcccaaaggaaacatttgtcatacctccaatggtcattcttgattaaagaaatcacagcaaaacaaattggaattgcaaactcagcttatatcttttctctcacataatttctatatcttgaagccaacttctttaaccataaaatgtgcattctccacataggatacaagactatagctgtgaactattttcccaatgagttacatatgatgccttaatcgttaatagtaaatagatgtactatttgtatgaggtgaggtttttttctcatattttagaaagaatcatcattgtcttcttattgtgaattatcaaaggcaaataaaaaacagcctcttcagtacctagcatattttcattagaaacaaattctattgcgatgcaaattctttggacaaaagtgaagcactttgaagattttctaatatttttgtcaaaagaatacacatgtagatgtgtactttgccttttccataaatattcaaaatgtattctgaaattaaaataaaatatttctataaaataaacacattcacttggtgttttttctttcatttgcatttaaagcagtaatcacaatatcacaagattctttgagtaaaaggccttctcttgaaaaggtagataatagaaagaacatccagccccttgcccctagatggagggataaaaacagatagatgacaaacattctataaattaactctagccacaaaactactgcaaatcaaaacaaccacaaaacctccacaaaggttatgtgcatgccggagcacatgtgtctgggggtcatgaggcatccacatattacaataaattttccccacaacccttattgtaaggttgaactattagggaaaaatggagcagatgctctctaaataaatatgatgtctttatttaatttcctagatgccatgccctcactaattatttttgttctttatttgaagggaaatagataccttagaagaaaactccttttaaatgttttcataagctcaatcaaactaatcacatgttaaaagccagaaaagaaattaaaggagagcttaagctaatatgatgaattttagagaggcaaccaaggcaatttataccaaaagtcaacaaaatttacacaaactcaattgtgtatttttttagattatgcgcacattactatgaaaatatccaggcaaaatgtatgaactgttaaattgcaattgaatttggcaatctatacaactagttgtcattctaataattcatttaacattattgaaatcagtattttgtcccagcgtgttatcatgatattaactgaatttattcaaaaaggagacattatttttatctcaggctgattgctagcaccctcaacttcaattttgtttgatttactgtgcatattgtattattactaagacagatgctctgagacacataatccttattggtctatatatattggtgagctttctttggtaaaaaaaatctggctgggaaaaatatcttgtttgtggaattaagcaaaacattagcatttcaaatatttttgtcttttaaaacaccttgtgccacaactaactcaatagtgggaaaaagatctttgttcagaactgtatgtgtgtaaaagagagagagaattcaagaaacaggtgttatatatttcagaaactcatacttcgggaaagaatagaaacattatttgaacctttagcccaaagactatccaattgcacttagatgctatttctgttccaggttaatttcttagaaaccattgcaatcttattctagtttcctatttaattttatatatgttatttacttttgaacatgggctaaactcaaaaaattttagtcagtgaaggttacagtttagtcccatattacctacaatcttaccgtaagtatgcccacaaaatgtttgccttacgacagctctatgagtaagactatctttgagcttaaactcaatcgccttgggtgatactcaacaggtgtgtatcttttgttttcctttggcatggcccaattttacacagagattttggtagaatgacttgttcttctcatatctttttagcttcagaatccggataactcaattaaggaaataaaagtgggagaccttcaaaggagaacaagtaatttatgggacctgaatttctgaaataatattaaggcaacattgggcttcatggcaaaacaccagaggttgggaagagttgcagatttactcttttgacattcacatcacctccctccctccattttaatagatgcttttaccaactaatttggtctttctgatgctttgattaggcaagttacagatatattttaatagttgcaaaaatgaatacttcaaagaaagcatagaccaaggaaatatattgttgaaaagtaacccctcagcttagagaagaaaaaatacacaatgttattctactatctataaatgaggtactaactggatgatgtgtgattaccagtgtgattaaatggcaaaaacagacacatggagaagctaagtagtatgctgaggcattgtctttttgccaagttaatacactatgcacactgttttccatacaagattctcaagtagtaactatagtaaagagcgtaactcaaaaaatggagtgcctaggtggagaggcatactggaatgcatgaaggtgtttcattatgtatgatgagaacagtctccaccttctgaagagtcttcaaaaaagcaaactggaggaaaagtcacacctttaaggtgcaaatccaacaaagatgtcttaagattctgaggaagaatttgctccttgccagtcagttatttccagactgcagcatgtagatgataagatcaagatatgatcgaagagacttttacttgtgcaagaaggtagtaaccatgctactatttttaatccttaagatttaaaacatgcatttaattcttttaaagatgtacttaatgtatattctgatagcattccaaggcatttccattgaaaagtacatgctataaattcagtagtcttaacatacataatacaatatattatgttgttcgcacgaatgttcattgtagcacttttcacaatagcaaaaacatggaatcaacctaaatgtccatcagtgacagattggataaagaaaatgtggtacatatataccatggaatattatgcagtcgtaaaaaagaacaagattatgtccttttcagggacttggatggagctggaggccattatcctccgcaaactaacagaggaacagaaaacaaaataccacatgttctcacttataagtgagagctaaatgatgagaactcatggacacaaagagaacagacactggggcctgcttgaaggcagagggtgggaggagggaaaggagcagaaaaaaataactattgggtactaggcttagtacctgagtgatgaaataatcagtacaaaaaaaaccctgacaccagtttacctatataacaaatctgcacatgtacccccaaacctaaattaaaaggtaaaataatcatgttttttcaatttaataaaaagaccccccaaaaaatattgcccttcagttaacaaataaagtgtgatgcgaggcaagacatattagtttactgctaattcatagatgaagtctgatgatttactttctgcatctgaatctaacaattcttattgggagaaaaaaatgtgtacatatggttctttggtatgtttgttgagtattatttttgttgattatgtatcagccaacatattgtgaaaactgtcatgctttttaattatgtgtttttataattaaggtgaattattagaaaagcccaatgattaaaactctaattatgtaactgttattttcacaggaagcttattgagactcacctgagaactattccaagtcatgcattttctaatctgcccaatatttccagaatgtaagtttttttaatataaagaaaagtttgcatttgtgatatgttattctctaaacgtgttctatcaagaaaaatacttggtattatacttgcataaatcaatggcagttatattgtcaatgtatatgacaattttatgtacatgatttttatttcattttgctatatctctactccctaattcctacatgattttttaaaacctaaatcaaatttaaattcatttgattttgagcagttcataattctcgatgtattttaatatatcttgggatatggcaaaaccttagctgtaaatctctcctataaacatcccgtagtttataaagtaaacatatatacagatagacaaacatccatctgtcctagtcaccaagtcttgaatcacctttcactactaatacaaatatttacattttgttataaacgtagccagtggtttcagatctctcacgttaaaagagaattaaaaataattctaaaccttaaaaattgaattgctatccacttacagtaaggagaaaagggattttccatattgggttgacaaagagtgaatgaaatgaagcaggtctttatttcatttaattgattttgacaggcaatccagatagttcaggcatgcgaaataatataaccagaagcaacctgtacagtttttggccaaatgtactcactccgtggccattttgttagtgtttctgtcatttcagtagttctcaaccacagacgactctacccctagaagcatttagcatttttggttgctaaatgcccactagagagggggctgctactggcacctagtgggtaaaagtgaaggttgctgccgaacattctacagttcataggacagtccccacaacagaattatctagtccaaaatgtcagcagtgctgaggctgacagaccatcctactgaacatctctgcagttttttatgttgctaacaagtccttcctctttcaaattcttgcctctttgttttccttgatattgctctctcattcctcttcttgtctcacctggctactcttccttagtctccttttctgacttcctattttatttttgccagctacttaattaccagctctttctttgtatattttgttctaattcctctataccccactctccttgagtaaacactcccattccttgggctgcactatttcctaatacagctaatttccaaatattaccacttggatgtcccacaggctcttcaaaaccagcatatccaaaataaacacatcatcttcctcccaagctgttccttctcttttaacagcaccactgtagcatcctataagctaaaaaccttgaattctcctttagctcttccttttccctcatctaccttatacaactgcctatttggtgtctctgtttgcatgtcccaacagcttggccattacttcattcattcaacagatatttattgagccctactttgtgcctggcactttgctaggtgttccgtacacagcagtagacaaaactcacagcagttcagttttattcctaagagagtgatgagtatcatgatggggtcagttattgggtgatatggaaactcacataagaggtctattacctacacaggagcagggagaggagttggggaagacttcctgaaaaaaaaaatagcacctgacctgtgatctgcattatatagcaaagagcagaagggaaaagcctgggctttctgaagaattgaaatataataagtttcttgggggtagagcttaggcagggaggtgggcagtagaaaaaaataaaacttaggtctaagttagtacagggtcttgtaaatcatgtgaaggagtttaaaatcttccctaagggctgagccattcaatggttttaagcaggcaagagaaatggtcagattttcatttgagaaacattcccttggctatgtagtggagtgaggggtggaagtggagcaaggctgtaggcaggaagctagtgaagaggctgatgcagtgcccaaagtacaggggatggcaaattgaaggatgatcattgagtgggaataatgaaaaaggatagagatttgagacataaataagggagggctgatcaagtttctgattaggacatctgtgtggttgatcggcacattcatttaggcagagaagtgttttgtatatttgctgtggagggtcagggggtatgttaggaattcaatttggggcatatggcatttgaggtgcagttatattgagtacacatcaggacacagacagaattttttcattcatttgataaatatttgttcagcccctactatgtgccaatcactgctctgagagctggggatacatcagggaacaaacagacaaagatccatgtccccatggagtttccatttgaatgggaggaaatagacaatgaaccaaaaacacaataaataagtaaattagatactaatttagaaggaaataagtacatgggaaaaaaagtaaattagagtaaagaggattgggagttctgggtatatgggggcactcaggggagagattcaggtagagattgagagtcacaaacaactgggtgtaactgggaccaggaggaggcatccgcagagagggagaagctaaagagagtgaagaaagaacaattttaagagcatgtggtccctgaagaggcaggaggggatgagatccaaatagagggattggccttctagaggaagatggtcactttttacatcataacgaggaagtcatgttgtaggactttctccttagttcagctaaaagccaggttcttgtcacatggccataaaagattaggctcacagacactttgaagggtgacaaaaatagaatttattgggtgaaagaggaaaagagggaaacagggactctcagcaaagcgagagtcctcctagtccacttcccgcctcacagattgaatcccaggtaccaccccacaacaggagaggccaggctcctccccactataaatgaacttcccgaagctccaccccagtacacacttctcccagggcacaggcagttgaaggttctgctagggagcccttttttacttagctgtctcagttgtaggaaaagatgggacagatgcaggtaaactaataggcttattggtggggaattcaaggcattctcgtgttaaagtttcaaacatttctatgacttatcaaattattaaaggatatctaagaagatggaagatggaggtggcagagttagaaatttgatgagaagatttgaaataaaagtggtgagcaataagaagagggttggttgactgagatataggagacacccaggcagatctgaaggctccactgaggcttcccccagggagactgctggattctccagtctgggttaagtgataggggtccctgaaccctatcaagcatttaacaccttgtgttaatcccatttaccttgtacattaatctgtatctgtgagtactgtgagttccttgaaggtagggaacaggcctgttttgtcattgtccagaaggatgtctgtcatacaatgaatgttcaatacatatttgtggaataaaagcacatacacatacctgaataatgattaaagatttgatatatcttggggagaagaaagagatcagtaggatgatgctaggtttgtctgagatggttcaaattcccacttgggattctggcataattgttaatggcaccttgctttaactcacaaaactatcccagtttgaatgataagtcatatggtgactgtaatgattatatgatgtttaaatgcgaagaagaagtaggatctgatttttcctagttgtaaaaatggggtaagtaagcagggaatcacaatttttatccccctgaataaacgattcctgccagttgtcttcacaaccaagcaatcacagccatacaaaaagatgtcattaggttggagaaactggaacttccatttgataatatgggccgagtgactatccttctggaaccttgagaaagactcatacttcttaactgagaaattcagtagaagatttggagcaatggaaaagatgcttagggaaacaagttggcagccttgaaaaatgaatcttgctctgctagcttgctcagcttcatccatggtaaatccccacagtctctacacggtaaattaattcctttcaatctgttccattgtttcctttatgttagaaatatatttgtatcaaaacaatttatataacgttattatctgcaagaggcaaagggttaagagactgggtaaatcaaaggataattatttagagaacaggtaattcaaaatagaaagcacagagccattataatactcataataaccaagataaaaacttagaatggaacaatcagcactcctcttgtaaacattgcatcgatgaggatactttactggcagattcaattcaaactataggtcagtggttctcaacattgcctacacattagaattggctaagaagcttttgaaaaataaaagtacttgactcatccctcataaactctgatttaattatcctagaccgggtcttggacatctgtgtactttaaagcccttcaggtagtttaattgcatgtccagggttgagaatctctgctatggctatggctggaaaccatctgtcaattgttcattttcccaaatgtcatagaaatacctcacaatagaaagtggtcattgaatttggctgcattagtcattctcattacaagatggaatttgaggaaactatttgaaatattccttatatgttcttgacaagttgtatttaggaatttctctgttttcctttttcagtacttgaagcttttatttgaattactttttgcttacaaagtttaagacggagcttgaattttcagcttcatttaaaatcatgaagagaagtcttaagggagtatgtcgtcaacctgtggaatgttccactagagaattgcgattttctcttcatctttgaaactacatgtctaattccatgttattagacattccattaaaaatgcttcttattgactctagtgttcttttctgatgctcatgtttttttgctattttgaggaactcttctattcattcagttgtttaataagagtcgacaacatgccaagcactctgaaaggcactcaagattcagtggccaaaaacaggcacagttctgcatttcagagaacttacagtctagtgagacaacagaaatatcacccaaagaactggaaatttgcactctgataattagtgaaaggagtttatagttttatatatatatatatatatatagtgatatatcactatatataatccctatatatacaccatatatacatatgtatggcaggttcaattcaaactataggtcagtggttctcaacattgcctacacattagaatcagctaagaagcttttgaaaaataaaagtatttgactcatccttcataaactctgatttaattatcctagaccaggtcttggacatctgtgtattttaaaggaaatagaagagttcctttaaaatggaagagttcctcaaaatagcaaaaataaaataaaataaaataaaagcaagcatcagaaaagaacactagagtgaataagaagcatttttaatggaatgtctagtaacacggaattagacacgtagtttcaaagaagatgaagagaaaacctcaattctgtagtggaacattccacagggtgacactatatatatatatatatatatatatatcgctaaatatgcatatgggaaattttaatcagggagtttggggaaagtttctgaaggaagtgacagttaaatgataatttcagataaataggagttaatatacaggaggaattcaggtatcacaagatctgaaaaaaaaagtagtaagtaattttaacataatttggcagaatccatgagggttgtacatgttgcatgatctgggaagcgcataacaaaaagttatgtcaaaaatagtatgtttgaagtttacaaccttactaactttctactttgtcttatatttttctgacattcagctacgtatctatagatgtgactctgcagcagctggaatcacactccttctacaatttgagtaaagtgactcacatgtaagtacaaggaaaagtgcagcatagacctaagccacaaccactcttgactgataatcttggggctccagatggcaatgggagctggtttcttgattgtgagtcaaaacttctgtttatgattaaattattaacctgttctcattctcagttcatgttaattcatcttcattacacctcaattccatggttggaagttaaagacaacattaaaagttctgttcttgaaccactatctgttctattactactgtgtcagcatattttattgatgtgaatgtcagtgagacaataggtatttactgagtaactacttgattctatggtctgtgcaagattctacaaagctggcatattttccttaattcggaaagagaagagttgcttggtgagattagaatagtagggaatttaataaccctagttctggagttggtcagagttggatttgaacaccggcatctctgcctactcattatctacccttggacaagtcacataatctttcctagtctcatttgcaaaataagtgtaataagagctgcaacttcatgtttatcataaatatggaattatataatatctagcacctgaaaaccagtcaatataccattcaaaaatagaataatttttctatttcgctagtagattacaatctataaaaagtgttacataaataatcacattgcattattttaagtagctatgtattactaatcatgaactctattttcttgatgaagaaacaaaaatacttatctacaaatacttagtatatcctaacattacattaaacattgtatgaacattatttgtttggttattatttacctcttaaaacaaccctgtgaagtaaatacaattatttccattatttatataagaaaaacataaatgcagagagactaaatatgttttccttggtcgcacagttaccaagggacagggccacaatctttataccataaatgtatgacttaaaaattcttccctatccactacattaagatgctttcaagaatactgaggtccaagatattgcttacaagtatggtaggctaccttacatcagatcaactattggtctgagaataacttaaggagctgaatttttaaaaaaatgtttgaaagtattagagtgttatgaagacagtaagaactcaatgggcaataagcaaatcccaaaaacatcatttggttattttcccttgaggtatttcctgaattgtaagcaaaagcttaagggctaagaaactgaccagaggtttaggcatctattagggctaggaaaataaaactctgagttccgggcttgctaagaaggattgttcctagtaaacaatccaggattttggttgagatcactaaagagcttcatcctagaagtatgggaaaactgtgactagatcagcccttgcaaagactaaagcctagctttgaatcaataaaaaataactcgagtttgtggggcaaaaaaatcaagagaagaaaatagacaatagaaaatgatccataggaagttcaaatattggttatcagacacagactttaaaataactaacatgttcaaaaatttaaatggcaagagaaaatttcagaataaaactgaaaatgataagaaggatcagttgtaaactctagaatctaaaaagtcaataaaacatctaaatacatgagtttcacaagagattaggcatagctcaaaggagaattagtaatctggaagataggtcagaagactataatcagtctgaagcatggagagaaagagaaaataagaaatatatagcacaataaaaaatctagcatacctatgactagatcccaagaaaagagagaaagaatgagaaaagcaatatttgaaagcaactttccaaaactcttaagagacatcaagtcacgtatgttagaagtactgcaaaccccgaaaggataaatacgaagaaagctacatcgaggcacatcatagtaaaattgctaaaaaccaaagacgaaaagaaaattataaaagccagcaaggctgggcgcgctggctcatgcctgtaatcccagcattttagggggccaaggcaggcggatcacgaggttaggagattgagaccatccaggccaacatggtgaaaccttgtctctactaaaaacacaaaaatttgccgggcatggtggtgtgtccctgtaatcccagctactcgggaggctgaggcagggaatcacttgaacctgggcgggagaggttgcagtgagctgagattgtgccactacactccagcctgggcaacagagtaagattccatctcaaaaaaaaaaaaaaaaaaaaaaaaaagcagcaaggaaataataaataatactttcaaggatgtaacaagactgacagctgacttttcaacagaaatcatggaacttataaaacaacagaaagatatttgtgaacagcaaaacagcaaatatctgccaacccaaccaaaagattatttaaaattagaaaaagatagatacttcaagcaaacaaaaattgagagaatttattaccattaggctcatattaaaggaactactaatgggaattactaagacaaaaggaaagccatcccacatgctaagacatttctgtgcaggaagaaatgaaaagcaacagaaaaggtcaatatatgggtaaatataaatgaaccttgactgcacaaaatgaaataatgtcttaggggatttaaaatactgttctttgctctgcatgatagtgtgggatcataaaattgtgcagactgaaactgtattaagcagtcttaataatcaataagaaaaattgtgttgtgatttctaaaagcttttatgaaaacattaaaatttctcagtcagttataaatggaaagaaaaaataataaaactaatatttcacatactgtaattgtcaacattagaaatacttagaagtaaaatgctttattgctttgtaaaagcttagcaagagtagcttagacagtgcttgaccttttatctttattatataagttacaatagaatatcttttcaataccctggcaaattgtcatacttctttctaagtctagattagcttccatcattttatcctttgctttttaaatattataaaatattttcaagtgtttctttaatgtaaaatttttttaccgtcattgtttcttttgggacatcttcatcctttgcatccatttttctcccatcactaagttcctctgattaatatctagagtttctcagccagcctggacaacatagtgagatcttgtctctaccaaaaaaaaaattagctgagcatggtagtgcaaaccagtggtcccagctacatgggaggctgaggtgagaggattaattaagcccaggcattccaggctgcagtgagctatgatcacaccactgcattccagcttggatgacagagaaagagctggtctctaaaataaataaataaataaataaatagtctcagatggtggtggtatcaacattttcatgccagtgatttattctataactccatttacattttgtttgaatttccctttcagtaatattacatttcatttcttggcttcattttcatctttattggtaaattcactctttcaattagccatttttaggaaatgtcatatgaggtgattactgggaaacacataggaaacacaatgacatgctttattgtttgtgaatgaactgagcaagagatgcccagtgagcaaccatcaatgactttgaagagtgatgtagttggtcacctattataatgtgcatctgttatttacatagtgatttgtggactgaagagctagcaacaaagtttgtactttattcaatgattaatagttaatatactatggtaactgaaacttgagggatgtgttgaggacagttattatttacatttgattaaatcatggtaactgaacttcatgtgtattggagccattcaaagtagaactgcttgtatgcatagaattaaaatatgcagtagctttttaaaaaaagtataggacattataaataatgtgaaagtgttctaaaggtctttgaattatctgagaagtggtaaaagtactaactgaaattaaactttaataaatcataaataaatgttttaactcacagggcagctactaaaatgcttgtagaagactggataactaacaggctaatagtagtggggaatggaatgaaattaattaattaatacaaaaaagcgagaaattggaagaaatagagagtttctggaataaatagtagatttaactccaaataatcagcatttacattaactgcattaaatgtaaaaggactaaatactctaagtaaaatacaaagattgattgctgaatttttaatactcgctgtatgctgcttacaagagacattttaaacattatacagaaaggttgaaagtgaaaagctttgggaggccgaggcgggcggatcacgaggtcaggagatcgagaccatcccggctaaaacggtgaaaccccgtctctactaaaaatacaaaaaattagccgggcgtagtggcgggcgcctgtagtcccagctactcgggaggctgaggcaggagaatggcgtgaacccgggaggcggagcttgcagtgagccgagatcccgccactgcactccagcctgggcgacagagcgagactccgtctcaaaaaaaaaaaaaaataaaaaataaatatatatatatatatatatatatatataaaatgcacacagtaactaaaagaaaactgatgtaaatatgcatacatataaagcataaagtcttactctaagggacacttcataaagattaaaggaattactatataagatatagtgattctaaatttaatgtctataagagcatagcttcaaaccatataaagcagaaattggtagaactaaaaagataaacaataattggcaatcatactgagagcttattttaatatagttttatcaataattgatagaacaagcataccaaaatagtaaatatactgataaaaagttaataaaaagatttgaacataatttacaaacttgatcatattggcttataaaaaatattgtatccaacaactgcagagtatatattcttttcaaagacacatggaacatttactaaaattgaccacatgtggggccataaaagcaagtctcaatagattaccaaaaaaattaaaatcaccatgttctctaactagtaaataacctaacttctaaataactctgatttctaattaaccataggattaaggaagaaatcataataaacattagaaaataattttaactaaatgataataaaaatatgacatatcaaaacctgtgggatgtagtcaaagtcatacttagaagaaaacatatagccttaagacaacatatattagaaaagaaggttaaaaataaatcatttatgtatccttcataagaagtttatataatagagcagtacattaaaaccaaagaaagtaaaataacactgaggcccaggaaggctgaggatccagtacagtaaagacaacaacagtcttcaaaattgaaaaccaaatcttctgactccaaatctcatatccatttatcaaaccattttgcttctttgccccttcaccaaaaataaaagcaattaatttgtagtgaagtcctatataaaccccattgatcttaaaagcagtcattttgtttgtattatgatctttttcctcacaaagattccagttgttatttataagtttttttaagtaaacattcaattctctactctgagcaaaagtgttaacttcctaaaccgaaggaaactattaaatacagtaattaaaaagagaatgagtttaaaaataaattattaaaagataatttgcttatatacttgagatattgagagtctaatatcttaaagatttaaaggataatgcaccttgtattcttcaaatgtttctaatatgtatctgacattattgtctgcaaatggttttggtcagcagaaaagattagtgaagatttttgcatgcatgccacccaaatgtttaatacatttgttttataatcatttattaagcagcgactataatcaaagcattataacttgcatgagaaatatagagctgaaagatcactcatctttgctcaaggaattgagaatggttttgtgggtataaggcatgaaactgagtatcgatatagaatgatttgtttaatttatataccatataagtaccatcaaccaaacgttcctgggattcctcagtatagaattaaagccctctgatttgtttaggaaagagagctctttattgtgttggatttgctgcaaggatagatatgtagatactaaacttatgaatacacatttcaaatgccaatgcatattgccagcatttattgaaaagctccaatgaggactacagcagtaaaataacataatgttattccatttcataagtgtgttttctttctaagctgcccttcaaaactgactttttttggtcctgtgatttggtaaatagaaagatgagcagttagtttaccattgccacttctaattatccctgccagtacctgtccagtcttacagagctctatatacattctctgagatggcttcccaattcatgtttagattttgttctgtgatatgaattagagtattagaacataagcactctttagcctaaagctgcctccttgtaaatttggcctaaaggcctctctgtatgcagtgaactataacctaactggatatgtgaacagaccacagaccataatttacttttttaccaatcaccgagtttcagccagtcacaggcgaccaattgttcaaacagtgttcaaataaggcaaaagctaagctataaccaatctagctgcttctatacctcacttctgttttctgtatatcaccttgtttgcatccctcccagctccagaaattctctatcacacagcagcaccaaagtctctctgaacctattctggttagggggctgcccaattaatgaattattctttgctcaattaaactgttaaatttatgtaacattttcatcttaacagtactgacattgggtctgtgacctagaattgtcattcccaaaacaaaaagctattcattcaataaatacagtatgtttaacacagttaaacctgtgaccatggcatctttttttttcttttattattatactttaagttttagggtacatgtgcacattgtgcaggttagttacatatgtatacatgtgccatgctggtgtgctgcacccactaactcgtcatctagcattaggtatatctcccaatgctatccctcccccctccccccaccccacaatgtggagaaataggaacacttttacactgttggtgggactgtaaactagttcaaccattgtggaagtcagtgtggcgattcctcagggatctagaactagaaataccatttgacccagccatcccattactgagtatatacccaaaggactataaatcatgctgctataaagacacatgcacacgtatgtttattgtgacattattcacaatagcaaagacttggaaccaacccaaatgtccaacaatgatagactggattaagaaaatgtggcacatatacaccatgggatactatgcagccataaaaaatgatgagttcatgtcctttgtagggacatggatgaaattggaaatcatcattctcagtaaactatcgcaagaacaaaaaaccaaacaccgcatattctcactcataggtgggaattgaacaaggagatcacatggacacaggaaggggaacatcacactctgaagaccattgcatcttaaaaggctatatgcaagattcaaaatagtagatcattctgttcttattcatacctcttcccttggcctctgtgatatcacaatcctggttggactcctatcatgctggtcagtctttcctatcatcttttgctggctgcttccccttccccagctataattattgggctttcatatggcccaatcctgtgtagtcttctcttttcactctaacttctcctgctatgtgatcttatctaacaattcccaaatttatatatctagttcaggccctcattcttagtgttggtatatacctattggtctacttgacctctcttcccagacatcttacacatatctcacgttttatatccaaaactgacatcttgattgtcgtcctgaaatctactactcctgtgtatgttgagccaataaatgccaacttccttcatcctgatgcaaatcccaaatacctgagatgtatcactataccttctttcctcatcacccacttctactccttcaccatgtcctgttgattctactaccctaatatacagaaaatgtatcctcttcctctccactgccaccacccttatttaagccaccatcatctcttgtttgaactatgataattttatatcttaactggtattcccaattgatttcctctaattcagtatcttcacagcagccagaatgatttttcttgaataaaatccaagtatcttaacataaacagccaggcccacaagttcagctggttcctgcccacctctgcgttctcatcatgcttcactcctgcacacctgtgttctttggttttttgaacagtccaatatctttctcacctcagggtattcacatgcttttgcctctgcctagacatttatttctctctctctctctctttgcctagttaactctactgattattttttcagcctaattatgacctacacagagacacataccattcagcccacttctgcatctaagttagatccccatttgaatctatccttgaatgctttttggtttagaacttactaaaatttagtatgacaatgcagatgtttgataataataggtctctggaaggcaggatgctttgtgtgccattcacttacaccaagctgtgaggaaatcaaactaaaacaaaaaatgaaacaatgtattctgaacatgcattttaaaaataatggattggaagagtaggctagtctgaattcatgaaaaatctgattgacagaatgtttagtatatgtgtgtacacacacatattcatacatatatgtttagccaaccttaattgagcatttaccatatcccaagcactacactaattgctcaacacatatatactcatttaatcctcacgacaattctctaaagtagttactatcattttacagccaaagcaactgagattcaataactacatctttatatttaaaatgcatttcatgtaaacatcacagaattggatcttgcttttatatccagcctgaaaatctcagccttttagttggagtgtttaatccatgacatttattgtaattattgatatggttggatttcagtctaccattttcctatttgctttgtcttctctgttctttgttcctttatttctccttgtcttcttttggattaatctagttgtttttgcttttgtttattagtgttctattccattggctttttagtcctttgcaaattttttgtgattactcaagaaattatgacatgcatccttaacttatcacagtctacttagaaataatattatgttactccacatatcatgtaagaaccttttgaaattaaaattccatttaccttcttccatctttcatgctattgttgtcatatattttattcctatatatgttataaacctcataatacattattatgttaactttaaagattcaattaacttttacataatttgagtaaagaaaaaaatagtcatttatatacgttcaacatatttaatatttccagtgtccatgcccttctgtaggtccaattatttccctttagcccaaaaaacttttagtatttcactgtggttctactggcagcaaattttctgaggttttatttactgaaaatatattttaccttaatatttgaaaaacacttttgctgagtatagaattgtagcaaagccatttttgtttcagccttttgaaaatatccttcaatgtcttctggccttctttttttctgaggagtagtcgtatccgtgttattattctcctgtaagtaatgtgttttttcccctctggttacttgtaaaactttttctatatctttgcttttcaactgtttaatcataatatgcctaggtgagtttttttatatttaatctgcttaaggtttgccgaacttcgtggatttatgggttgctggttttgttaaatttggacatttttgtctactatttcaatagagtatgttagaagtgatacaatgccagttctagtcccagtctttaaaagaactggcagcttttactttatatccttggaaccctgaacaaccatgtaagacgtccaactgcactgatggagagaccgtgtgggaagatcctgagatcctgggatggagaaaagcctagctgagcctaaccttctagcaattcccatcaaaaagccaggcatgtaagcacacccttttggaccctccaaattgttccagacaccagctgaataacacccagtgatcctggtggaggctacagagagcagaaaatcacccagctcagcactgtctggcatcctgatccacaaaattgtgagctataataaaatgttattttaaccacttaatctggggtaatttgttatgcaacaataggtagccagaggaagtagcaattatatgtcagttaacaatgggtaaaggcattgaggatttgtaagaaaaaaatacaagaatggtaggttctctgtgagttattcaggatcctaagtggatacaaatcatttcccctgggtagtaacttcagcgaggatactgtttggaccgaaaagtatgcatgtaataaagatttatatctgcaaaatgatgaaacactggacacttccattttctattgtactttctctataagaaagtcaataacatacagattgctgctgttgttactcctaataataatagtgaccaagttctgaatgccttttgtgggccagcactccactaaaagtacttcacatacactatctcactagtttttaccaagcgttagtttctgctatgtcaaatgaagatggtaatacataccttgcagagctcttgccaaagttttcttagctaagacatttcaaagtgagaatttgaacccaaaagtgtctgcctccaaaaccactgcaatgccataaaatctctttaattaaaatatctgcaataattaaagaaaatgctggccaggcgtggtggcccacacctataatcccagcattttgggagactgaggcagaaggatggcttgagcccaggagtttgagaccagcctgggcggcagagtgagacatcatctctatgaaaaatattttttaaaattagctgggcacaatggcacttgcctatagtcccagcttctcaggaagttgaggcgggaggatcacttgagcctacaaggttgaggctgtagtgagtcatgatcgtgctacacactccagcctgggcaacagaatgagacccctagctcaaaagaaaaaaaaaaaaaaaagcaaagaaaaagaagtgctgccctcagaagaatgtttttacttttatgtgagtttttgggttttgtttgtttgtttgtttgtttgtttgtttttgagacggagtcttgctctgtcgcccaggctggagtgcagtggtgcaatctcagctcactgcaacctccgcctcctgggttcaagggattctcctgcctcagactcccaagtagctaggactacaggcgtgtgccaccatgcccagctaattttttgtatttttagtagagaaggggtttcaccatgttagccaggatggtctcaatctcttgacctcgtgatcctcctgcctcagcctcccaaagtcctgggattacaggtgtgagccaccgcacctggcctatgtgagttttttaaatcaaaaataagtgaaaaattttacaactgggataggtgaaatgtgtgacttatgccttatagtacaataagactatattttgctgatccactaagttgaatcaagtggatgcatcagaggtttcaaaatcaccagctttagcaccaatccttaaataatcatgaaagtagctgtatgcacctgccaggcaatttagagaatcacttctataatgttctatttttagtggaaaatctgctgataaatttaaattttcttcaatgtgctttaaaaatctgaatacttataaactctcctcaatatctcttatttttaatttctcaatacattaaaagatacatcaaatcatgaatattgccttttggttatagattatttctttcctccagttacatatggaatgttaataataattcattaataattatcaaagaattaagacttctctcattgaaaatcctcgataatgtaggaaataatttattctgtgaactttcatattatagattaatatgaaaagtaagtgctagtctaacagtcaaggctttagaaactaaggtctaatctataccaagagctttgacagacttttaacttttgacccagtaattccacttctataaattttccctaagaaaatagagtagtgaaaaaaagttaatgtaaaaagccatttgtttcggagttaattatttatattagagagaatttggaaaggacttaaatgcttagctaagagaatggtcaaatatgaaatactaagccaggcgcagaggcacgaacctttagtcacagctacttggagactgaggtgggaggattggttgaggtcagggatttgaggctgtagtgcactatgaccctgcctgtgaatagccactgcactccagcctgggcagcatagcatgaccctgacttataaagagaaaatctgttgctatagacaatttaatcacataagaaaagcttttgtcattatgttatttaaaatatatatgtatgtatgtatgtatatatatatacttaacagaacaaaatagtttttctctgtattatcaaatgatgagagtttttttttacatttaccagcttattataaaggatattacaaaagatagagatgaagattgcatagagtgaagtatgggggaggggcgcagagcttccgccccctcccttggcacaccaccctccaggaggatggtcagctgtcagaaagttcatttcctttttgtatgaatgtgtttcaaagttttttacaataaatatgtattacctctatagtcagatgaaattaactttttaaagatcactgtgcattaaacttgaaattaatacttgatgtcaagatacatcagtaatgtattatgtgatagaaccctgtcctaaaatgttaccttaaaattaatttacctatttattagtctcaggtttcacctagggattgtatagcacttaaaaaatttatagtaacaaaatgatggcttgggcaatatatacacatcttatttttaaaataaatagtaactatttccttataccacccagagtatgcagcaaagtgcacctaatagatgtccagtaattattcacttatattctaattaatctcttcccactctaaccacttgagtgagcaaacctagtcaaaatcaaggtgactgccttccatttttttgaactataggtgaggtgggaaattaaagaaaaataaaattaaaaagaaagagaaataagctttcctatattaagctgacttgtcccagaggcagcaacaggcacagcccagacccaggaaaagtcttgataatactatttaatgtgctctggagactctcccagcactccctcaacatagggagaagaaaaacaaattttcctttgttttatggaataagtttatagatacttgttctctgtcactagtgacttcaagtattctgttttatctaagaagtacaaagaaagtcataagaagcctgagtaggcctgaactacagctgcctgggcaccatagtgaaggttatgagataaaccagtgcaaggctctttagagcaaaacctagataatgaacatctaggttgcttggcaacggtcatgtgcaatcctgagtttgtcctgcctctgtatccctgctttcacaccactgtaaacttgcttcaagctagcccacccccttttgtgaaatgtgtataaaagtcaagtgctgtctttgttctaggcccagtctttggacattgagtctgctaagtccgagtgcactcaataataaagatatcgtcctgtatacaccccaaggtctctctctggtcctcctgatcccacaacacgggcatttaaaagtaaacgggaaaaaaattgaaaatcaaattgaaacaagagttaaaaagaagctggggactggtggagagctaggcttttggctaatattcttgttcaatttattgttttgggtaacaataaattggctgtggcagcttctcttctgacatcatctaactgagtcttcttggtttatgctggtctgaagtgttctcatccccatctaattttgcagatgaaatgcaaagtcggctttttgattgccctcaaattgtttcctggcttggcatgcttctcactcattaactggggcagtttagggtgtggggaaatatctccaagggtgagaagcacagtcaaatgccacgatccaatgcccgttgaataattgaggtaggaagggggacactaggaaaatggaaggaaattagtggttggaaaaaaaaaaagtcttccttaacagaagattttaagtgttttccccttcttctgttcctcattccctcgcctgagaactcccttctctcatcctgctgatttcccatatactctttgaggtgtggactcagggactgagtgcctgctgcaatgctagtcgtaacgggaaagccagatgtcctgtgctacgcttttattgagaattaatcaatgtttcttaggggaagaaaaaaaacccagaatgtagacatgtgattaagtgaacctaactgcatgctgaattattgatctgttgatttgtgaaaactgccattggacagcaatgttacacttttcatctaaatgtttatttcatttgaaatctaatgaaggagaattagacaatgaatatttacatatatttttagttctgctggatgatttccttgaaacctcatttaaaaaaaaaaaaaaggctgtatttgaagtcataagtcctagataaaggcccagtgttgctgctaagtgtataacaggagattattcacttgccctttcaaaacatgtctccatagttttgtctgcaaaatcaggatgatccttacctgcatcacacgagtcagttatgttgctccctcactaggaggaaattcacaccctccctcaggtgaaaaaaaagtacactgtttctttttaccctttaatcttctgtattaatttgtattcatgcttctgtgaagaaatacctgagactgggtaatttataaaggaaagaggtttcattgactcacggttctgcatggctggggaggcctcaggaaacttacaataatgacagaaggggaagcaaacaggttctttctcacatggcagcaggaaagagacatgcagagcaaagtggggtagatccccttataaaaccagcagatctcatgagaactcactcactatcacgagaacagcatgggggaagcaccctgtgatctaatcacctcccgcgaggtccctcccccaacacgtggggattacaatttggattacaattcaagatgagatttaggtccctctcccaacacatggagattacaactggggttacaattcaagatgagatttgggtggggacacagagccagaccatatcatcttccaaagctgaatttttctaatcaatacgctttaagagccttgcatatttccccaacaaagaaaaagagcctcgctccataaaacagcatacttaagcagcatatctggcacatattttaatgttattttttatagagaatatataaagctttacttttttgtttttaaagtttgagattttttgcatcctctttattacttttttttatttagataaaataaaaagtgaaaattccacattccttctttttaaacctatctgctagatgtgaccactatgaacagagtactctatatttttggaattttatttatgcttattagtttgggtaggtgaattactataagaaatagacaaaaatacagacatgtaacagcccttagtgagtgaggtttactgcttgctcatgggagagtactggatggatgagtgggagcacagagcagccaccttcaggcagtcactcagggcctcaggttgctggaggcacagccatcttcagctctggagggcatctccattcctagtgtgctgtattacaaacagcttttctttcttccaatgtctccagctttctggcagcatagctagcctcctgcacactcaggccataattgcttaactcaaaatggtgtgattcaaattcaccctcagaggcatgcttgaaggcattcaaatttgaacgcctctttcacccttctctgattagatgttcttttgtactcacttctgcccttcctttcttcctatctttgaataggttttactagttgcatttgcttcttatgttacctctctatttaatgattgattgattgattgagacagagtcttgctttttcgcccaggatggagtgcagtggcacaatctcagctcactgcaacctctgcctcctgcgttcaagcgattctcatgtcttggcctcccaaatagctggaattacagacataagccaccacacccggctaatttttgcatttttagtaaaaacagggtttcaccacgttgcccaggctggtcttgaactcctgacctcaactgatccacctgcctcggcctcccacctgtctcggcctcccaaagtgcttacaggcatgcgccaccacacccagctgttatctctcaccatttagctaaactactggcagtctacgaccactccaccccttctctgcttcaggagatacttttcaaaagtcacttgtgagcaagtggtaagctgttgccttacctcagaaagcagcttcttttccctgctgttttcttgtggggtctctcattcatctttctcctttgtagctcttacatttccttctagaaatcttctcctccttcatgtttccttctctctccttgctgcctctcccacatttctcctcttccagcctccatgtaagttgccagcctcatttaatcaactgttactagcagctgcatttcatttcccttttattctctaccttttcagctgacccaggtgggctgcattttctttcactctgacgttctcttagaccactcactcaggactactcgttcaacgacagtctcttgtggagcaattttccagactgcaaaccctgctcaatttccaaactcctgcatctagtttacatctgtttgtctctggcagtagttcaaaccctcctcccccaatggaaagctctggcaaggagtttattgctcaccctggaaagagagaaccacctcaacagagattgatagtctctagaggggcaaggtgggaaaattatgagattttggagtagggtggccaactgtcacactttgcccaagacagagggaattccaaggatatgggctttgcattttaaagccaggacaaaaaaatgaaagattgtataaagaggatctttccatgcagggtcttgtttaggtaaaaatcatgacataatagtttaggattagcatagtgaggatttggaagtgaggagttctaagatcttggggtataaactgttgatgctttctgttgaagcattgatggttctttgtttcaaaaactctctgtaatgaacaataaagcaatttgcctgggcaagagtctcctggaattgtagttatgttaatgaggacaatggaccagtaagggtatattattatagacagtaagctgtgtgtttagggaggagagaggtaggtgatttctgttctcagagttaactccatcctctcttttccaaggtctgtttcatattcagtgtccttagttgaaatgcctagttgaaaaaaccagagagttttttctaattttgcaagaatgtcacaacatctccagtcccaagtccctgatgtctcttctagctttcattgcacttatgaaaataacaataataaaagcattattttagagccctaactatgtggaggccaaacataaaatccctcatgaatattatttaatcctcacaaaagccccacaaaagaggtgttgttaattgttcctattttacagacaggaaaactatggctcaaagaggccaagaaacttgtccaaggtcatataatcagaagtggcagagccaagactctatttcgagtccatctgggctattcagaaataaaaaggagtgaactactaattcatgttacaacatggatgaacctcacagacattatgctaaatgaaagaaggcagacacaaaagactgcctgttatatgattccatttatatgaaatgtccagataaggcaaatttataaagaaagaaaactgatcagtggtttctaggcataaaggagcaagtggagactaactgcagatgggcctatggttacttttgtcattgacagaaatgttctaacctgtgatgatggtttcaaaatcatgtaatgttactaaaaatcattgaactgtatgcctacatacaatgtttgaagtttatggaatgtaaattctttttcaataaaactttaaaaattacagaggtcacattctaagctttctgactggtaccaccaatgactagatgctggttcttttaggtgccactcctaaggagaaatgctaaaggtttactgggttcttatatacttttcatgtaagcatagggaatgccttaaactcttttagccaatcaacctatgttgaatatgtttaatttaaccagtgagagttcatttctagcagttacttatttctctaatgctaactgtgcattcttgatcagcatttatataaacctaagtatgtaagttactgacacacgatattgcactatacatgcagaagtgtcttcgattgctgacatgacaaaataaacccaagtgaactgtgaagacttaccacttctgtacatctggtatggcaatgacagagccttactgtccatcttgctgtgctgtcgttcatcataaaattccctcatcctcccactccaacactcattgtcttggccagaatacttataaataataaagatatttgtcttcaactcctcaccaaatcattggagggatttttcttttttctctaaatgtaaaagaaaaaaaattctgatactacaattaagaacaatgtagcccataaattaaagtggacagaaaccaagccaacaatgcaaaagagctgagcagccattgggtccccgtgaggagacaggagtagtttgtcattgatgggacccctggcagctacagcccctggggtaccctgtggcgtaaatgcatatttttctcatgaacgtttgttaaaactgatttatgttgttttgtctttgataagaacagatacggatgcattatagtgactgtgttccttgtaacttatacagagaaattcggaataccaggaacttaacttacatagaccctgatgccctcaaagagctccccctcctaaagttcctgtaagtattaaatcctctcccatcctacttttctggggggagggggtcagatttaatgctgttgtctcccaggaatctccctagatgatgtggtccaggttcattttaatggtgtatagcctgggtcgggggcaaggtatcgggtgaaatgatccacatttttaaaacctattcaaaagtcagcacataatgctggaaccagagacctgctccaagaaacaggagggagaaaatgctatcatgtatatgtggtccttaaatgtagtatttcagaacaaaacaaaacaaaattctgagagccagttggtcaattttgtttgaaaatgggtatcacaacaatattattagagtggctgttacacaggaaaaaaaacccacaaagagtaaaatacacttccatggggagtggagggaaaacagaagggacaacagtttcaacctcccactccagcactcaaatgtccagcactcactgctttgctttgaaaacaccttatgagctaaccataagctccatgaatccagggaccacaacattttttttctctgttgaatctttactgcctagtacagagtaggcgctcagtacaaatgtgttcagtggatgtgtctgtatgacctcaggccccctggataccaggtggaagagtcctttttcctacttgcatgcattataaagattagaaaacaaagagtatgaagaagaaaattgttaaaaaaaacttaatcccaaaccccaaaataagcactattaacatttcagttcatcttcatccagaccttcaaaacaaacttatgttatcatagatattttatgagataagcccttaaggatgaatagagggtatcttgaacaagaatggggagatagaaaagaaatttagctggatggaatagcatgataaagacacaaatgtagggaaccacgcagcttctttggggaactaaaaatagttgcttttttttttttttttttgagatagagtcttgctctgttgccccaggctggagtgcagtggtgtgatcttggctcactgcaaccgccacttcctgcattcaagcgattctcctgcctcagcctcccgagtagctgggattacaggtgtgcaccaccatgcccagctaatttttgtatttttagtagagatggggtttcaccatgttggccaggctggtgtcgaactcctgacctcaggtgatccacccgcctcagcctcccaaagtgctgggactacaggcatgagccactgtgcctggccaatagttgtatattgaagaggtgggtgtgagagatgccaggggaatggaagacactgatgggatatgaagatgaaaggatgtctggaaagccatgaaagcttatgggacaagacaatcactcttcttatggactctgagtttcaaataatacaataaccctttgatgtgatgatcccccactatatgctctgtggggaacatacaggtttctaagacattgtccttgcctgtaatctagttgaggagatgtgtatgaaattgaaaagtgcctctcctacagaagaataatggaaagtgacgaaggagagacatatacagtgtttgggggttcaggtaattagagaagacatcagaaagaagacccacagcatggttttaagggacttgtttgagatttttgaagaatagaaagatcttgatccaagtatatggaccccacttgactcttggacctttttccctcctactgttcttcatgagcacctattgcaattgaactagttcgtttactgtatttcaaatataccttatggaatctcacctctctcctttgttatctggaatgtccctcccatttgctgattttgagacctctggctcctgctgcctcttcaaatcctatgccttcttctctagaaggagtcaagtctgaatttgcctcagaaggagtatcaatggatatagtttttctaccagaagaccttctctagagctttactgagtagtgtctagatctcactctatgctatgccaaattctcaaaaaaaaaaaaattctaattacattcaagtagctgcaacaaatgttaaaacaactaaatctgggaggcatcaggagcctgagaattcttgtattcatggtgttttatgcatgtcttttaatcttaacatttttctgtagatgatataaactacagaaggtaaagactttgtctttgattggtttccttccttttctggacactgtctttttttgagacagagtcgccctctgtcacccaggctggagtgcagtggcatgatctcggctcactgcaacctccacctcccaggttcaagtgattctcatgcctcagcctcccaagtagctgggattacaggcgcatgccaacacatgcagctaatttttgtatttttagtagagacagggtttcgccatgttaggctagtcttgaattcctggactcaagtgatccacctgccttggcctcccaaagtgttaggattataggcgtgagcccctgtgcccggctctctggacatatttttttaaatggtactgttataatggtactctcaggtcactgctgtaggaaagatattcttggcaaaataacagcataatatcatgtagagcttgaaagaggaagctggcttaaagtcatcatatcttcctgtcccatcttcttcttagcccttcactaacaaacacataattttttccaattaaacgagaaaatcacacacacacacacacgaaaactgaatttatatttctagtaaacccacttggttaaaacaatctccagagcattctaagccgagcagatgtattgacaccagtggactggattaaattattatgccttgagggaatatcatctcatccaaccatcagaacttgcccatagttactcagatatttagggaaggtgttgggagtttgactacaggttgtcttcagaacccatgctttcagctattacattattctccttcctatgtgttgatttttttacctaaattctatgcttttttttctctttttttcattaatttagtggcattttcaacactggacttaaaatgttccctgacctgaccaaagtttattccactgatatattctttatactgtaagtatgcacacatgccatgtttgacaatattttgtttgtcactgacaagaactagaatacagtcatgagggtaggttgaagataagtaaagcaattgtttcaaggagtaagcaatgatcaggtgtgactacactggcatgaagtaaggcaaggactgagaaataaccactggctttagcaatgtggtttgttggtgactctgccaagaacagttccagtggagtgctggttggagtgggctcaagagagacttgggtagacagaattagaaagagttaccataattaactcttttgagaggttttactattaaaaggagcagaaaatagctcagtaattgcaagatattgagtcaggagaaaagattttgtttgtgtgtttttgtttttaaatggaagaaattatgcaatgtttctttgccaatgggaatggttgaatagaaggaatatttgatgataactatgataccttatttttcatagagttttaatagttttttaaacactttcccacacatgacatttgctcctctcagccaccttataaggtgtaaaacaaagttactgcttttccatttatgaatgaggaaactgaggaatagaaacctcaagtgattttgtctgagcagtgtctcaaggaacagtcagaagtggtactcaaattactgcctgtgacctttgattggcacccatgtgccctttttcaaagctggtgacatgggtcagttgtcttactaattgtataggaatgaaaggacgtaaggcagagagaattacaagttgagtttgcattaaagagtcagcaaaatgtagaatgataagcttcaaactcttggggttttgctagaaaaaaaaattgatcatacttctttgttgcaaaagagctcagttcaaaatgtaagcaatcttccagaaactagaatggcgtagaaaggttctccaggagcctggcgaagtttggcaagtgaaggacattttagaaatactcattaaatgaaatcctttaatccttttatcctgaccttcttaaaggtccatgcatgtagaaaactctagttgttgtggacaaagtgttgcagattcgggagaagcctctcaaatccatctgcctaccccaagatgaggattaagtcagggacctccacccacacctaaagctctcacttaccccacatttgggctccaggtgcatgtcatctaggacagctctcaccacctcaccagacctctgagccactagcggttaagaagggtcagtgaaacttaaaaagaaataagattaagctatattgtgtcctgttatttaagtgcatatgcgcagcaagacccctgctgcagaaggaaagcattttttcattaagtgtttttgtccctctctcttgcagtgaaattacagacaacccttacatgacgtcaatccctgtgaatgcttttcagggactatgcaatgaaaccttgacactgtgagtattaccagttctactccctccatcaactaaattctattttgagccattttcatatgtttacagaccatccaagagccatactgccttatcatatatactctatagagtacaaagtgttttacacaattaaataatagtattgtcttatgggatggtactctgtagactacaaaacagtttaggtaacaagacaagaggattccattacggcagtggttggtacatttttcacgtgaagaaccagttaggcattacagaccatgcaacctctgtaggaactggtcaactctggcattgtgtggcaaaaaccgcagtactcaatatatacactaatgagcatgtctgtgttccaataaaactttatttatagaaagaggcagtggactagatttggcctgcaggccttatggaataatcatctgtatccaagtgtccccattctacagaagaagaactggggtttaagcaaattgaagtgacttacccaagatcactgagttaaaaaaaagtggtgccactaagaactttataaattctgcactcacacttttactcagtaatcacaaactgttattaagctcctgtaaggggatattacatagaaagcatagtgctgctataggtcagcatttttccagagcctgaatgggggcaaagccctttagatggtcaaaagtagatgcttaattagggatattcacaaaatgttctaaaggagaagatctaatagaggtataaaggataagttaattctccaagctggtagaaagttcctctctcattgtgtaagtcacaaagtagagttggagctacctctgcagggtctcctctctattttcaggaccactgcccaagttcaagcctggtgaagtttttgtctggattgtcaccccagtttcatttctctgctcacactaaagttggggtggaggtctttatcagatacaaacctgatcaaattactcaccagaaaaatggatccaagcttcatacagttcttctaaggggctattttctgagccattcctagtttatcagtttgggcccaatgaagttacctcaacttctgagagcaatggagcatttcagatgatccttctcatcacaacctggtgagcggtcccttgaaaagacaaaggaggctccttctcagtcataatttcttcttaccatgcagaaaaggcccaggctcttagcctgctcagctccaaacttcaaagccatttacttcctcagtaaagctttccattgcgccatatagtgctcatcataaggaaactcctacatgctaaacttctttatagaatattacctctaccccttgacaccatttctctaaaacccccatatctcaagcacccccctcaagtgaaagctcattgtcccacacctagcatagagcccagcatgtgtttctagaaacatctgagtgagggaagcccatatttcctaaaatatagaggagaggatggcatggattattcatgatcttttcagatgattatttctacattttggcaaaagtccttgcttcttcgaagctcaggctcaaaaaactatcaacttgaaaagacacatgttccaacaaccgactttgtacctgtattcctggtaggagaaagtttcagtcaaagtttgtaattcttttgtcttgcttcaccatgttcccttttcaaggccgatttgttcattaagaattctgtttaatatctgaaatgcaattcaaacaagtatttttaatgtccaggactctcaacaaatttaggaaaattaaaatgccatatgcacagttctcacatcttcataaaagagttctagtttagaaaaaatttacttatccacagagttttctcagccattgtgcttatattcctgggatattgcaatcctcacccaggacatgttagtagctggaattaaactcgctatgtaattatttaagatgaaacaaaaacaaacacatcaacaatgacaacaaagccacgagaatcttgctcagtttcccacaactatataggataaatccaagttttagaattctccttttatttatttatttttttaattttttttttttttttttttttttgagacagagtctcactctgtcacccagagctggagtgcaatggtgcgatctcggcttactgcaacctccgcctcccaggttcaagcaattctcctgcctcagcctcccgaatagctccttttaacatggtcacctaataagtgttcctcactttgttaaatatatagttatttgatcctctctgcaaccttttgattgggcattacatttatgtactaatttatcacatttttagagataaactgaggataagacaggttgagaaattctcaggatcatccagctattaagtggcagagccaggtctaattccaaatttgaactttcctgtgtgcttcttattgtgttcccaaggttcacatgtggtagattactgtggttttcaaggttcccttacaactgccactaggagttctcactagcagtgcctgagtgtggttatagctgtcttctcttatcttcatgccaataaccaccaataacctcttgcattcccatatagcccagaggtcccaaggctggggctccttctcctgcagaaaggggggctgcttttggtaggtggaaataattatatttgaggttggccaggcacagtggctcacgtctgtaatcccagcactttgggagaccgaggcaggcagatcacctgaagtcaagagtttgagaccagcctggccaacatggtgaaacccccatctctactgaaaaatacaaaaattagccagacctggtggcaggcgcctgtaatcccagctactcaggaggctgaggcaggagaattgcttgaacccgggagcagaggttgcagtaagcagagatcacgccactgcacttcagcctgggcaacagtgccagactccctgtcaaaaaaaaaaatcatatttgaagtcagggatcctaagtctcaacagtcctagaccaatgtgtttttggcaagtcaccctcatgtctcagtaacttcaataggaaatagaagtaataacatttcagactggctccctgaatcattaaatgaattaattagtcatagaaacacagcaacaagttaaaacattaacatttccagcccagtggttcacacctgtaatccccagtgtttcgggaggctgaggcaggcggatcacttgagcccagactagcctgggcaacatggtgaaacctcatctctacaacaaatacaaaaattagccaggcatggtggcacatgcctatagtcccaactgtttgagaggctgaggtgggaggatcgcttaagcccagggactcaaggctgcagtgagccgtgattgagccagtgtactccagcctgggtgacagagtgagagaccctgtctcaaaaaaaaaaaaaaaaaaatccataagaggacatggtctatctactttcttagattcatctatgaggtttaatttaattcagcccataacccttaaacatttaatctgtgataagctctgaggataaaaagatggataaaatacaaaggtgaaataacatttaaatattaatagaaaaataaaaacatacgcattcagatgaatgtctttcaaaatgtttatcttaagagactgcagctgctcctccactattgacattgggttaactattacctcaaatccctttttctgaatgtatgtggaatattcttttaaaatcttcaatggtaacaagtttgttactcaaagtaaatatgattctgagaaacaccttaaatttactaggagctaagtcaggagaatgggcattcaaactgagaaatattatcttgtttccaacaacttgtactggaaagttttcttgtgggatacatatgtgggacctgaaaaacctttatgtacatttatgacactgaagaaatatagtccaactctccagaaacaggccagcaccacttctcaccagtcactgatttctcttctctctgttggttgtaggaagctgtacaacaatggctttacttcagtccaaggatatgctttcaatgggacaaagctggatgctgtgtaagtcaagggtagccatgaaaactgtcactttcccttaccctaagaaccatccaatggggcagaatgctgttgagagataggttctaccagagcatcttccacgccagagttagtgtgaccaacatggaaatgaggtcaaggaacttggcaggggcccactttagtgggcgcttacgttagctccaatggtaagttccaaagcttttctccctggtgtgtgtgtgtgtgtgtgtgtgtgtgtgtaaatgttcatctattatgtacatgaagtaaaaggatatctttaatgaagcccaaagctgttcagaaaataaggtggtttctcttttagtcctttctgacatgtttttgggaaagatgtcagtttatatttgattcactcagaaatagctaaaaaatcatatccaacttttgccttttcaaaaaataaatagtgctgggaacagctgaaacagcaaacaatagactttgtgtttgatgtgttttataacactttttgagtatttctttacaaatgatatattttttctatttcacctttttctatttgttgtttttttcaaatttacctgctcatttttgctagtgtcttgttatgtattcatttttgtaattatattatttgtttcactttaaacatttcatacatagtaattttatgttccagaaatgatccctgcaaaatctgaaggccttatgacacaaaatctgttgcgtatggggcttctcaaaccttcctgggcatcagaccctctgagaggtcttatcaaaatacacagtctgattctgtagctctggatttggcctcgggattccatatttctaacaaactcccaggtgatgccgacactgctgttcatagaccacactttaagtagcaagggtgaggtcaataagctgtctaaccctatgcagtggctctggatggagaagaacactcatgtagattatgtgattttggttgatgttctggtttaggggttaggtggtaggttctggaacaattccatttttaaatggtaaatggtaaaaaggtgtttgaactcattacactgaggcaaggctccctgagttctgtttgaagtgaagtctcactctttgctggcttttgtgcttcataccagtctttatgaaatgaagagttacagtaccattctctcgattgtctggttgtggagtcataatggttcatttccattatttttttactacataattataggcaaagtctaaaaagactctatcgagtaaggtgatacttaccccctcaaatttatttacagaattggagagaccctccttccatcttaactttatgatactaacttcttacaatctttcatctacttttcaacatatttattagacacttgcaatgtaccaggccctgtgccattcactgggaaaacacagatgaacaggagccatgtgctccctgcccacactgagcgtacattctggtgggggtcagctcaagggcagcaacatcaaagggcaaagtacattagggagaagtgtacccaatccaaaatatgcatctcagatagaaaataactgaagcctaaatatcgaataacattgctttccttctttggagatacaagctagattttttctaggtttatcccattgttttttaaatcattattaaaattaatgttttagaaatgaattatcctatattccaggtttcaagttctttttctaatctagcattctggaaaggtggcatttgattttaatattgtatgaatttcaccaaatattttcctctttgattcaactattcctagaaagctatgactcttagggtaatgatcttcaaattcaaattttctatgaatggagtatggagagttcttaaaataatgaagatagtttgtaggtacttagggtataaagatttcagatgactatcacacagttctagacatagagtgcaccaaaagtttagttagcataaaggcaacaaagactcacattagcaggggcagggataggaggtagtaaggaaatcttcaaccagggaaaccaaagctgttaatatggctcctgaattcagtgtgttcacctgactcttgcctgaactagaactgcctttccagaatggtggattagagaaagaacctgaaacctgggatatagggtaattgatttctaaaacattaatttttccacaagcaaaagattttggagcccaagataagaatctatgcttcaaattaactgcctgtttttcctgccgtatttagtcattggaagatatgaccctcagacactatcaattatcatttattcaagatagagtataaaattcagaccttaaggtctacagagcaataattctcaacattagggagttttcaaagcactaatgcctaggttttgccgtcagacattctggatgtagcaggatcatggggatttaaaactctctccaagtgagtccaatacagagcaaaagtcaagaactactgctgtaaaatacattatcagtcttcttgtccaattgtcacgttttacatatgaagggaatgaagcccaacaagaacacatggctttttttttttaacgtggctgttttaatttgatagagcttcctagtggccaagtcaaagctgagacctgggtcccctggttcagaactctttccctgccctctgctgggattcatcatggctgacttaccagccatcaccaaggtgtgaacatccaactctggcaagtgcagcttgtttcttagccctgaagattgcttagacttcttagctcaatctattaaaggcgctaaacacagaagttaaaatatcttgatcctgaaaagaatgagatcatgtgagagaaagaaggcaactcaaaactcgaggcataatcaggagaagtttcagaggacaatcacatcaagaaacagtgttgttagtccacgagaacctgactttaccaatgctgcaaagccattcgtgagcttccagatgaagtctggtcggcgataacctgacaaaaatgctgggatgataaaacgttattcaagtcaaagaattggtattgaacttagtttacgtatattgactattttccctcaaaacatctcactcctcctcatgattggcctcctggtcatgtttagagaactctgcaaagacttcaagagattttcaaaagaggtcttcttcaatcaggaagtgttagtgtgctaagtggatctcagtgtaggtctagcagcttattatcttatgaccagccataaaattagacacagagtatcaaaggagtttagagacattttctattgaaaggatggaaaaacgaacaagtgaacaataatttctctttgagcttctcctcagcctttgtgataagagaagggatgggagagggggagctatgttcctttaaactatatttcttcaactctctttccatagtaaattaatgggtgttactttttaaaagaaatttatgatcttataaagttaaacaagatatataagtggacttttcagatcttctaataaaatcatctgaattattcatatcaaagagggggccttagtttgcagagcttctcaagcagttctcagttacaggagcatctctctggtctggtgttctacagacttttgaggggaataccgcctctgataggtaggaaaaaaatcaaggtgtttttctaccatcacacactcaatacaacagttttgacaccaaatgtttggaggcttttcccccacacaacaagtaatcaattctccaatgcacaccagctggatgtcctacaatttaactcagttctgatactctacctggagatagcatcagatccacaggttaagggctcagtcccacaagactgcctgctacttcagatgccagtcacagctcccaggttgtgtcctatgcttctgactgaccaattataaatcagggttcccccagtcccctcctcagttcagttaatttgctaaagcagctcacagaactcagggagacactttaaaggatattacaaaggagcagctgtgtggcaaagatgcatagggtgagaggtaggaaggagtgcagagcttccatgccctctctgggcacacaccctcccctcagctccacatgtgccttgaccaccttccagctacctggaagctcatccaaaccctctcctctctggctttgtatggaggtttcattacataggcttgatttattacatcactggccattggtgatcatctcaatcttttcagcccctgtctcctacctgaaggtgagaaggtggagctgaaagtccaaccctctaattatttattgatctttctggtgaccagccctcatcctgaagctatctagggattgacagtcaccagtcatctcatcagcatacaaaagacacttgtcactctggaaattccaagagttttaggagctgtgtgccaggaaacagataagaccaaatacatatttcacaatattacactactgaagaagaatctttcgatataccatctgcttgggaagcaggtaaatttaagaaggtttattcaagagatagctgtggagattctaagaactagtaaagatttcaaatgatcagatggccttctgaaattaaccctatggaaaaagtacgcaaagtcctcacttagcatcccagatagggtcttgaaaactacaacttgaaatacaaacaatgtataatgaaaccaattttaccataggctagttgatataaataggagttgagtttctatagcatatttctggtcacaaaaacaaccaaacttttgcataaggaccaaaatgcttctaatgttaaatatggaaacaaatatgagctatacatacatttaaggtaggttaataaaaacaagagaattatttgcccaattattccagttcaaggtcacaggtggccacagcctattccagaagctcagggcacaaggtgggagccaaccctgaacaggacgtcaccccaacatgggacacaatcacacataccaccacactcacttgaactggcaccatctagacacaccaagaaacctgatctgcacatctttggggtgtgggaggaaattggaatacctggagaaaacccacacagacatggggagtgtgtgcacacttcacataaacagtagccctggcctggaaaggattttattctcattaaaactaagcaggccgggtgtggtggctcatgtctgtaatcccagcactttgggaggctgaggcaggtggatcacaaagtcaggagatcgagaccatcctggctaacacggtgaaaccccgtctctactaaaaatacaaaaaaattagctgggcgtggtggcgggcgcctgtagtcccagctactcgggaggctgaggcaggagaatggtgtgaacccgggaggcggagcttgcagtgagccgagatcgcaccactgcactccagcctgggagactgagagagactccatctcagggaaaaaaaaaaaaaaaaactaaacaatagtgaatgagacaatattattagaggatctgctgtatatatagagactctccgtacgttcacaccagctttctcctcagaccatatcatggattctgtgggaggcttagctgacggcagagatattctgtcagtgacaatggattttcaattcactggtgccatgacttactgtctaactatcccttgaaacataggaaagaaatcagtgtactatttcacaatactttcttgacatttttatgttaagtattaaagttatttggaagagtttaacaaatgtggaaactatttctttgttaagaatcttttgtgtcttggtttctaaaagtctagatcaggggtcagcaaactttttctgggaaaagcccagatagcaaatatttggggccttatgggacatatggtcttagttgcactacttaagtctgcctttgtagtgtgaaagcagccatagacaatatataaacaaatgagcatggttatgttccaataaaactttatttacaaaaacaagggcaaggtaggatttgactggagggtcatagtttgtagacctctggataaaagtattcagtgaggatgaccattgtgtggcgaaatatgtactctgtttctctgaatttctggtaaaggttaaagggcaagcgtgggatcaagataaaaagtatctggattaaaatatttggcgttagaaagtacagatccaatcataatagaaaacaaatttttttaatcagtattttgaatccaagctggaaactgctcctgttataaaacaatgctccatcattctaccctaagtttctgactcctagtcaatagaaatttattctttcctagatttaagcacttcagtaaaaggtatcatgtaaatccagtgtaaaatcaaaatgatggttgtgataaggagccctgggactggaggaagacaaggattgagctataggtgaaggaaagaaaggtcaaggttccatggtaataataaaatagtattcacattgtgtttttaacatagggatgttgcttttggtgtcaatgctaattaagattttaaactaaggcaaacacatcaatctcctgtaattatcttaatagtgttcaaggatttcacatggcatgttagcaatttggtaatttctccagaagtttgtccaggtatcattaggttctcatttaaacaatgtgtcatccaaaagagcaatcatcccctatcattccacttcatgacaatttactgaaattagcagatcgacctcatttacactcattttttaaaatgtaactgaataatacaattacagccaagctggacaaattccacatcgagtgcaagtgctgatgcctcagcagcagtcaagcaattagttaggatttcatgaaaatgatggcagatgtgtaaaagcacattgtcctatgacttcctatggcgccaagaatgttgtcatcactcagaggtgaaattaataataatacaagcatcccttgctcaacagaagttgaactgtacttggtcacaagttaagtcacacattcattgtttggaatttcttttccatcctctttccacgcaatctgcgtggggatatgttgcttctcacagaatgtctgattctctgtatcacatttcctattgtcaaactctagtaactagctactatctgacagtaaacatttaggcaggaataaaaataccattttgatatgctaagagcccaccaatacactaattattatgaacagagtcaacagaattaatgtgctaattagcatcatgcattagctgattcgaagtaaaacaccacatcttggcacactgggaaaagacaatgatagagaatattataggattaagaaggctattatttatcatggggtaagtatttgaacagcttgtaggatatactctaaggctgacttttccctctgcctattgagagcttgagtattttctcacaggttactatttacaaacagctgtcctgatttctgctacaaaaggatttccatagagcaatccagcttctctttaaactaacatgagaggtaggcagggggtccctttaattttctgaattagcaacgctgtgggaggaaaacatggttccccacagaagtgttcccatgagagtctcacaacataatcaaggcccagcccaagttccccataaagggactgtggaggcacaggctgaaattccatcttggagctgcaatgtatcctaaaactccccagagagccaagttcagcagcaatagcaaattctcttgccacgacatcacactcctctctctggcatagatcacgtctttctaaacctggtatagagggtgcctctttctaggagtcacccaacaatcaggctttcattccttcctccagcaagtctttactgaatggccgctatgtgccacgagtgagtccaacagaaaagggcgtacataaacacacatatagtacacataatactgagtttgtcaatcgaatattttcctcagctcattcctcaccaccttcattttcctgactgcattggtcttccctaactgtgaactattcacaatcttaaatcagggcagggcttcttaactccatgtatggaaatctgacatctcttttctcagaagaacttcatttcttccaacaggttctcaaagaggaataagaccccaagcggtgaaaagctgttgaacacatagagatgtagccatgtctatcttatttttaaaggaaataccagttcttttctcataagccctttccagcatagatatttagaaaccctgactttcaaaaagtatttcctttcgtctcttactacaagccttttgagtctcttttaagctactttatgttcatcttctccttgcaagggatagtttttatcactcctctctaaaataatcattttctagagtaggttaaccagatagcctaccaagatttgtgactgatttatccaagctggttacaaatgtggatttcagaagaatcaaggtaagtcatggtcaaggaatcagtttaactagactgataatcccaggaaatgtcatgtgataaatgaggttgatggaagcactttcctggatatcaaggcttctgtatatgtatttcccctccccactgtcttgacttcagatggaaggcaagagcagcaagctgatgcaaggttgaaaagctaaatgaggcagccctcaaatctgctgaaggcagagtgatggtttcacttttaagcatctaattaactctaagaggtaaagtaccccaacagcagtgctggttttagagaacacagtctcctgaagtgtcagttcatctccgttcatcttggccagggctcctctgcatcctcctcctcccctcctggactctggctggcttttccagtctgaagtcttctgcagagtttctggtaaactgcaatgcttatcaaccaggctccttatcctcaggagtatattaaatatcagatgaaaacactgcagaattggacaagcaataatttagttttacaataatttctaatgattagaaagaacaagctgaatttcacttgcagcagttagagatgaagaggaaaaactgagatgagttcaccggctcttacttgattttcaacagcctgggaacagaatgtgatctgcaagctgcattgtccagagaatacaaaaagagatgcaagccagtgcagcccttgtactgaacttagttgtctttttacaaaatcatgctgttcaatatcttctctgcagttgtttttttttttcaaggtggattttgcccactctgggtgtcactgaccaaaggaattccatggacatagtgggttaaaggagagtcaaacaatgatcaagtggggattgtgattgaagccactgggaaggcacagattggctgctttagcatcttagccaggtctctgaatgcatttgagatttattgactctccctttgtcatacttaacaatgccctgaatactgggtgttctgccactaccagaagatgccaagtttgggctatacccttgaggtgtttgtaaaccagatgcctcaaaaatcactacctcaacaagaacagttggtcaaatgccaccacaccataagccaagtcttctattttttcactctttatgattttttctttaaagcaatcgtctgtgtcaccctaagagtttaacactgcccactttactgtcttgatgaaaaagtatgttgatttattttctactcattcacatattcatccaacaaatagttacagagatggtgaacttggcactgggtagacatagaactttcattctggctggggagacaaaaaataaagtaaacaaataaataaacaaggtaataattatggattgtgataatgctgtgaaagaaatagagagtgtatggaggcaaaatggtaatggctactttagattagctagttctcaatctctatttaagaagaaaattgggccggcacggtggctcatgcctgtaatcccagcactttgggaggccgagttgggcagatcagttgaggtcaggagctcgaaaccagcctggccaacatggtgaaaccctgtctctactaaaaatacaaaaattagtcaggcatgatggcgatcgcctgtagtcccagttactcaggaggctgaggcaggacaatcgcttgaacccaggaggttgcagtgagcagagatcgtgccactgcattccatactgggcgacagagtgagactccatctcaaaaaaaaaaaaaaaaagaagaagaagaaaattgaaagacccaaaaatatataccaatttatgacatgtcattttgtggagtctcagcacttactcgtcatttagtgattccctcatcctgcccagaaaggagagatttcttcagcactggtgattggtaaaactcttcttcctcccacggtttcaacgaagactcatgcctgggtccagttaaccaggagggaagtttctctgtgagggctctggagaagaaatccttccgactgaaggcttaatattattattaaccattacccttaaaaatgttccaccatgaagagcaaaccccgtaagtagaataatggaagcattagccatatctaagcagaccttctgagggtctctgctatattcttttgcatcaacaggtggccactcactaatgtttaagtggaccaggttatgttgtgagttattctaaatgtgtaaattgggagcatttgtaacaaggatatatatatgtgctatgcttctttttagataattttgttgtgtaataaagttatggggaaacagccagtttcaaaatccttggaagcttttatccatttggagggaattttatttcaaaatcactttgtaacttaaattgctccaaaaacattttaccctctaatgcccagtgtgtttttaaaatggaatggccaatgtgcccaccaaacctcttccatggaaggttgatgagattactctgtaatctcatctggctaaacactgctcacacacacactattgggttgtcagatcaaatacaggccacccaatacaatttgaatttcagatcaacaacagacaacttttaatataaatattttttaaattgcatggcaaatatttttactaaaaaattattcattgtttatctgaaactcaaatttaactggcatcttgtatttttatttgctaaatctgacaactttacccaaagaaaacatctgaatctctgacagtcctcagcatctctcaccaccctcaccatcttcattccattcctaatttaagcctagtcttcaaagttaaattggaatataaattaatactaacaaacaaaatttggtattacagaggattggcattaaagagaattaaaaaatacagttgccactggcctgaaaaatagggaattaaaacaacttttaagaaatttaggtatgcaaactagatcataaacatgctcattttcaaaaacttctgccataattaatgtgtaaaactttatacaattgaaacctagaatgttttaagtgctcaagccagaagaagataaagtatcttctaaattcttgaaatcagtcaatactatggtcacattttattctgatatttgtactaatttgatgtgatttcttaaaatcacctaattcattctctctctctctttctctctctccctctagttacctaaacaagaataaatacctgacagttattgacaaagatgcatttggaggagtatacagtggaccaagcttgctgtgagtaagacatacaaaagaatattttagtctttttttttctttttttttttttggaataaatggagacattaaggggagaatcttatgttcaagggtagaaaatgttgctgtctcgggtaaaggcttctgcaagtccctcttttcctggctgtataggctacctcttggaagaaagtccttgtcctttgagactcagaaggccccacgctccagtatgccatcatgatgcctgctaaggcagccaccttggtgtacatgctcacagaggctctgttcatggagcagctgctgtttgaaaaattttgaaatgcaagatccacaactagatggaaggcactctagtctttgcagaaaaaaatgtacctgaatgtacattgcacaatgcctggcacaaagaaggaagaatataaatgatagttcgactcgtctgtggaagaacttacaatcatggggaaagatggaataaaaacattttttaaacagcatgaaaacatacctatttgtgcatttcctttgatttacacccccacatccaatcagtgatcaggttctattgattctgcttccctgaagcctctgtatcattgccaccttcctcattcccttggttttgcctcagtttagaatctcatcattgagcatccactctagtccttgccaaagtggatcacaggccgggcacagtgtctcacacctgtaatcccagcactttgggaggccgaggcgggcagatcacgaggtcaggcgatcgagaccatcctggctaacatggtgaaaccctgtctccactaaaaatacaaaaaattagctgggcgtagtggcgggtgcctgtagtcccagctacttgggaggccgaggcaggagaatggcatgaacccaggaggaggagcttgcagcgagcccagatcgtgccactgcactccagcctggacgacagagcgagagtctgtctcaaaaaacaacaaaaacaaaaacaaaacaaaacaaaaaaacaaagtggaacacagcaccgtagagatacacaagataatctgttaggggcgagaggaaatattagaggttctatttatacttatttttaaataagaacaaattaagttttattaatcttttatttatagatagccactgtccctcaggtgtcaggtaggggtggatgcctcctagagaagggtgagtgatccacagtcctgagcactggataccttcactctttcacctttaacaatgttatttcactttcagactgaatgcacccagtgcatttaaggtcctgttctcttaacacatacgctccatccaaataagaggtcagagtgatcttgaaaatctgctgtgccacgtgggggttactgttaattcatggcaaagtacttaaaattattatgcatttttctttttacaagaagacaagtggggaaaaaatgtattaaccttttctgtgataaagtccctgtcagtaatttttaacctggaagatatttttcaataacacttttatatctgcttcttcaagattaaggtactacttcgccaagtaataagaaaagtcattgctttttcaaagaaatgtatgctttagagaaaggctttagaaacaggtatttggaaatattcacatattatgcgattttcctgataaaaaattgtcaatgccataaaaattctgtttggttcaaatcagaaatagaattttaacttgtttttaaatctttcaaattaagtttgttatgaactaaattgtatctgtcttcctaaattcaaatgctgaagccttaacctctagcatcttagtatgtgactgtatttgaagatagggtctgtaaagaggtaattaaattaaaataaggctgttaggtgagccctaatccaatctgacaggtggcctcataagacaaggagattgggatacacagagagacaccagggatgggcgctcacagaggaaaggccacgtgaggccacagcaagaaggtggccatctgcaagccagggagagaggcctcaggagaagccaaacttgctgacactttgatcttggacttgcagcctccagaactgtaagaaaatacatttctgttgtttaaatcagccaatctgtggtattttgttaccatagctctagcaaagtaatacagagttgtagcaggtttaaaatccatgtgtataaaatgtgaaaatgaaacacctccagatcaccttgcaaaaacaactgattgacatcagaaaatataaaatttcattaaaaacatgtatttaattactgaattagattgaaaaatgagaatcttagtttaataaatgcagttaagcctgctctattcttggtgaaacacccatctttggtaattttttcaactaggacggccatttaaaccaaaatcaaaataaactgaaccaaaagcagactttgaacagccatagccaaaagggttaaaaataattttcaaaactaattaagcatatttgataacattgcttttgcttttatgaaactttaaaaaatatatattacttatcttcattgcattattttaaaatgtatgtttagtgtgttatggtatatattatatagtattacaaaaatacatgtatagggttcatgactgttcatatgttagtggtacatactcagatattttttacttattaatatgtgagattgaaagaatttgaagaccaatagtgtagaccagaaccactcaaagtgagttcattacaaggtaagtggctgtccaggatatacagcaaagcacagcttcttttttggagaaaatcttgtcatgaaaataaagtcaaccaaactcaacagtgtgtttagttgaagtagctggcttacatccagcatacgcttcttatccttggaatggtaagaagctattggccaatgggcaccatacgttgagtagcagtagtctagatgattagcgtctccaaatctggctcctgcctttatttagtcttggttcctctcaaatccaccctccccaaacctctttgggttcacatgcaaatagaatcttaaacccaatactggcctcccattcccctcaggatagaggtcttggtgtggcttgcaaggcattgccataatcttcagctttgtcttttacactactttacgcctctgatcaatggtccatccatatcgaacctcttagctcccttaattctccaacctacttacactgttatgctaaactcttactcttcctactgtctggaaaaccctgctataatcttgtctttctgatgagcacctgctggcattttaattctgccttagagggcagaattgtatttccacaattctggttcatattataatgcccaaaacacagtatgagcttaataaatatttgtgaaattaatatggtacccaataaataattaaagcactcttctgtaaacattatagcacttaaagagcaatcatattttaaagatattttagtctgttgtcctcaagggaatgtgtccatttctacttctttggaagtggtcaattaaactacctgcttgtactgcctcgaagttgttttttatatttatggcaagattttctacaagactctcccaccaagttaagaggatttgtgaaactgcctgaaaatgctttccctgcctcttggtggcattccaggttgtggaaagtgacaaagatgaggagttatacctggagttgactcccagccccatcacttactaactgtaagacccaagtctcagttttctcatctgtcgaaacaggataaagtaagctaataaagtttaaataagataataaaggaactaaatatatcctcaataatgttagacattattatgattattttcacttcttcctgaactttgacacttcattattctgatctgttgtaacctctctgatcactccttccccatttctctccttagctcactgcatcattcctcaaaatggggttccatcctgggtcctggctctttttcctctatatcttctcctttggttaaatcatctgctcacaagtatcatgagaatgtgaatgatttctaagtttagggcctcataccttagctcttatttggccattcacccagctgaaattcttttcttgctccctctcattcctatccaatcccaacaatctggttaaactctccctagccagcctttgaaaatgtacaataagcatttactgatgagaacttgctaagcttgggattcttcactgggaactaccagtaggggagggtcactacattaaagaacagtgagtgaaaagcctcatcaagaaggtggcaattcagaaaatatctgaaagaaacaaagggacaagcctggggacaatctgaagaaagagcattttagacaagtgcaaagacccccaggtgagaatatacctggcacgtttgaggaatagcaaggaggccattgccgctcaaacagagtaaagtaaacgggggaaaaagtaaaagctgtgatcaaaaagatgatagggttgaggagcaacttgcagatggtcttagaggccatcatcaggtcttttgatttgctctttagatagaggggaagccataggagcattttgagcataggtgtgtcacagtctgactcaaagtttcacaggaacatgccggctgttgtgttgaaaataaactgtagggaaccaagtatggaagcaagaagaccacttaggaatatgccaaaataatataggcatgagatgaaagtagtttgcactaagacagcagcagtagagatgatgagaaataatctgatcctgactatattttttaaggtaaagccaacaggacatgctgatggatcggatatagcagatgatgagagaaacgaaggaatcaaggagaactgtaattatttttgactgagcagttaggagaatgagatcactatttcctgagataggggaagttagtttgaggtcccatgatgcatgcaggcaggcagtgatatatgtgggttcaaaagtcacaataggggtcagggctagagatatatttgagactctttggaatgtagctggtgatgaggggatacaggtatagaagaaatctcaaaaaatgaatagaattgagacttctgaactttccccaccaatgtgatttccctgatctttttttaaacaacattaaaatgacagtacttctgagaaaatataaatacattaaaaagcatgtatttttaatgacaaagagtaggaaaggtgatcatgtgagtaaatgatgaatgtcttcaaaaaccaagagagagctgcacgctaagtacttgcatgggtgaaatcaataaaatgcaagctaattcaaatcacaaaatctaggaaatattttatcaattaaatcttaagtgttctgcaaatgagaatataggtgacactgaagctggtcagtctcattctgcacagtcaagcactacttcttactcatcccagaaaaaagactagaattttctttctgttaaaatgtcatcaccaagactcaaggagaataagcacagttggggttagaaggcaggtactgttctgaaaacaggattatatgaaaatttacattctaaaatgtaagaataacaatcctcttatccactcactcaactcatagaatattggcaaaatgtataccttccaagtaagagatgagagtactgaggaagctgacaggcccaaggaaaagaaaaaaaaaaaaaacctacaaaaagtatcactgggggggaggagccaagatggccgaataggaacagctccggtctacagctcccagcgtcagcgacgcagaagacgggtgatttctgcatttccatctgaggtaccaggttcatctcactagggagtgccagacagtgggcacaggtcagtgggtgcgtgcactgtgcgcgagccaaagcagggcgaggcattgcctcactccagaagcgcaagcggtcagggagttccctttcctagtcaaagaaaggggtgacagacggcaactggaaaatcgggtcgctcccacccgaatactgcgcttttccgacgggcttaaaaaacggcgcaccacgagattatatcccgcacctggctcggagggtcctacgcccacggagtctccctgattgctagcacagcagtctgagatcaaactgcaaggcggcagcgaggctgggggaggggcgcccaccattgcacaggcgtgcttaggtaaacaaagcagcagggaagctcgaactgggtggagcccaccacagctcaaggaggcctgcctgcctctgtaggctccacctctgggggcagggcacagacaaacaaaaagacagcagtaacctccgcagacttaaatgtccctgtctgacagctttgaagagagccgtggttctaccagcacgcagctggagatctgagaacaggcagactgcctcctcaagtgggtccctgacccctgacccccgagcagcctaactgggaggcaccccccagcaggggcacactgacacctcacatggcagggtactccaacagacctgcagctgagggtcctgtctgttagaaggaaaactaacaaacagaaaggacatccacaccaaaaacccgtctgtacatcaccatcatcaaagaccaaaagtagataaaaccacaaagatggggaaaaaacagaacagaaaaactggaaactctaaaaagcagagtgcctctcctcctccaaaggaacgcagttcctcaccagcaacggaacaaagctggacggagaatgactttgacgagctgagagaagaaggcttcagacgatcaaattactctgagctacaggaggacattcaaaccaaaggcaaagaagttgaaaactttgaaaaaaatttagaagaatgtataacgagaataaccaatacagagaagtgcttaaaggagctgatggagctgaagaccaaggctcgagaactacatgaagaatgcagaagcctcaggagccgatgtgatcaactggaagaaagggtatcagcgatggaagatgaaatgaatgaaatgaagcgagaagggaagtttagagaaaaaagaatgaaaagaaatgagcaaagcctccaagaaatatgggactatgtgaaaagaccaaatctacatctgattggtgtacctgaaagtgatgtggagaatggaaccaagttggaaaacactctgcaggatattatccaggagaaattccccaatatagcaaggcaggccaacgttcagattcaggaaatacagagaatgccacaaagatactcctcgagaagagcaactccaagacacataattgtcagattcaccaaagttgaaatgaaggaaaaaatgtgaagggcagccagagagaaaggtcgggttaccctcaaagggaagcccatcagactaacagtggatctctcggcagaaaccctacaagccagaagagagtgggggccaatattcaacattcttcaagaaaagaattttcaacccagaatttcatatccagccaaactaagcttcataagtgaaggagaaataaaatgctttacagacaagcaaatgctgagagattttctcaccaccaggcctgccctaaaggagctcctgaaggaagcgctaaacatggaaaggaacaaccggtaccagccgctgcaaaatcatgccaaaatgtaaagaccatcgagactaggaagaaactgcatcaactgacgagcaaaataaccagctaacatcagaatgacaggatcaaattcacacataacaatattaactttaaatgtaaatggactaaatgctccaattaaaagacacagactggcaaattggataaagagtcaagacccatcagtgtgctgtattcaggaaacccatctcatgtgcagagacacacataggctcaaaataaaaggatggaggaagatctaccaagcaaatggaaaacaaaaaaaggcaggggttgcaatcctagtctctgataaaacagactttaaaccaacaaagatcaaaagagacaaagaaggccattacataatggtaaagggatcaattcaacaagaagagctaactatcctaaatatatatgcacccaatacaggagcacccagattcataaagcaagtcctgagtgacctacaaagagacttagactcccacacattaataatgggagactttaacaccccaatgtcaacattagacagatcaacgagacagaaagttaacaaggatacccaggaattgaactcagctctgcaccaagcggacctaatagacatctacagaactctccaccccaaatcaacagaatatacattttttttcagcaccacaccacacctattccaaaattgaccacatacttggaagtaaagttctcctcagcaaatgtaaaagaacacaaattataacaaactatctctcagaccacagtgcaatcaaactagaactcaggattaagaatctcactcaaaaccactcaactacatggaaactgaacaacctgctcctgaatgactactgggtacataacgaaatgaaggcagaaataaagatgttctttgaaaccaacaagaacaaagacacaacataccagaatctctgggacgcattcaaagcagtgtgtagagggaaatttatagcactaaatgcccacaagagaaagcaggaaagatccaaaattgacaccctaacatcacaattaaaagaactagaaaagcaagagcaaacacattcaaaagctagcagaaggcaagaaataactaaaatcagagcagaactgaaggaaatagagacacaaaaaacccttcaaaaaattaatgaatccaggagctggttttttgaaaggatcaacaaaatagatagaccactagcaagactactaaagaaaaaaagagagaagaatcaaatagacgcaataaaaaatgataaaggggatatcaccaccgatcccacagaaatacaaactaccatcagagaatactacaaacacctctacgcaaataaactagaaaatctagaagaaatggataaattcctcgacacatacactctcccaagactaaaccaggaagaagttgaatctctgaatagaccaataacaggagctgaaattgtggcaataatcaatagcttaccaaccaaagagtccagatggattcacagccgaattctaccagaggtacaaggaggaaatggtaccattccttctgaaactattccaatcaatagaaaaagagggaatcctccctaactcattttatgaggccagcatcattctgataccaaagccgggcagagacacaaccaaaaaagagaattttagaccaatatccttgatgaacattgatgcaaaaatcctcaataaaatactggcaaaatgaatccagcagcacatcaaaaagcttatccaccatgatcaagtgggcttcatccctgggatgcaaggctggttcaatatacgcaaatcaataaatgtaatccagcatataaacagagccaaagacaaaaaccacatgattatctcaatagatgcagaaaaggcctttgacaaaattcaacaacccttcatgctaaaaactctcaataaattaggtattgatgggacatatttcaaaataataagagctatctatgacaaacccacagccaatatcatactgaatgggcaaaaactggaagcattccctttgaaaactggcacaagacagggatgccctctctcaccactcctattcaacatagtgttggaagttctggccagggcaattagacaggagaaggaaataaagggtattcaattaggaaaagaggaagtcaaattgtccctgtttgcagacgacatgattgtatatctagaaaaccccattgtctcagcccaaaatctccttaagctgataagcaacttcagcaaagtctcaggatacaaaatcaatgtacaaaaatcacaagcattcttatacaccaacaacagacaaacagagagccaaatcatgagtgaactcccattcacaattgcttcaaagagaataaaatacctaggaatccaacttacaagggatgtgaaggacctcttcaaggagaactacaatccactgctcaaggaaataaaagaggatacaaacaaatggaagaacattccatgctcatgggtaggaagaatcaatattgtgaaaatggtcatactgcccaaggtaatttatagattcaatgccatccccatcaagctaccaatgactttcgtcacagaattggaaaaaaactacttaaaagttcatatggaaccaaaaaagagcccgcatcgccaagtgaatcctaagccaaaagaacaaagctggaggcatcacactacctgatttcaaactatactacaaggctacagtaagcaaaacagcatggtactggtaccaaaacagagatatagatcaatggaacagaacagagccctcagaaataatgccgcatgtctacaactatctgatctttgacaaacctgagaaaaacaagcaatggggaaaggattccctatttaataaatggtgctgggaaaactggctagccatatgtagaaagctgaaactggatcccttccttacaccttatacaaaaatcaattcaagatggattaaagacttaaacgttagacctaaaaccataaaaaccctagaagaaaacctaggcattaccattcaggacataggcatgggcaaggacttcatgtctaaaacaccaaaagcaatggcaacaaaagccaaaattgacaaatgggatctaattaaactaaagagcttctgcacagcaaaagaaactaccatcagagtgaacaggcaacctacaaaatgggagaaaatttttgcaacccactcatctgacaaagggctaatatccagaatctacaatgaactcaaacaaatttacaagaaaaaaacaaacaaccccatcaaaaagtgggcaaaggacatgaacagacacttctcaaaagaagacatttatgcagccaaaaaacacatgaaaaaatgttcatcatcactggccatcagagaaatgcaaatcaaaaccacattgagataccatctcacaccagttagaatggcaatcattaaaaagtcaggaaacaacaggtgctggagaggatgtggagaaataggaacacttttacattgttggtgggactgtaaactagttcaaccattgtggaagtcagtgtggcaattcctcagggatctagaactagaaataccatttgacccagccatcccattactgggtatatacccaaaggactataaatcatgctgctataaagacacgtgcacacgtatgtttattgcggcactattcacaatagcaaagacttggaaccaacccaaatgtccagcaaggatagactggattaagaaaatgtggtacatatacgccatggaattctatgcagccataaaaaatgatgagttcatgtcccttgtagggacatggatgaaattggaaatcatcattctcagtaaactatcgcaagaacaaaaaaccaaacaccgcatattctcactcataggtgggaattgaacaatgagatcacatggacacaggaaggggaacatcacactctggggactgttgtggggtggggggaggggggagggatagcattgggagatatacctaatgctagatgacgagttagtgggtgcagcgcaccagcatggcacatgtatacatatgtaactaacctgcacaatgtgcacatgtaccctaaaacttaaagtataataataaaaaaaataaaaaaataaaaaagaatcactgatagtctcccaaagtcaccatggtaatgcccaccagccaataagcttccacacacagagcttcccataggcctcccttacaaacaagaacagacatccaagaaccagcagaccttcgaggaaatccattgacatgaaaaacgtcaatgtcttagagttttcagtgtacagatctttcacctccttggtttaaatttattcctagtttttgttttgttttgatgccattataaatgggattgttttctttgtttctttttctgatagcttattgtttgtttatagaaacacaactgatttttgtaggttgactttgtatcctgtaactttactgaattcatttcttagttctaacaggtttttggtggaggctttctgattttctgtataagataatgtcatccgcactcagaaacagtttctcttctttctttaggatttggatgccgtttatttgtattgcctaattgttctaactaggacttccagtactatgttgaatagatgtggtgacatgaaaaacaaggactaaaataaacagaaaaaggaacttggaaggaacagaaacaatgcaagaaccagaagaaaactttcatgaaagttataacaaatatcctcagagagacaatgttttacatgtgcaaaacaattccttatacaggaatattcagaaaacaataaaagagcttttgaaaattaaaaacatgaaagccaaaaccaaaaaagtaagcagaagttgttaaagataaagggaaaaatggcactcagtagagacagcaaaaaaatatgaaatagaggaaagaaaaaacatgaacattagaaattcaagccacgaggtccacaacccaactaacaaaagttttaggaagagaaaacaaaaactgaaaaatagtgtagcagatttcccattaataaagaaaatgaattttcagaataaaaagacccacggagaacccatatggcaaaaaaaaagggtggggaggcatgaaggtacatcataaaacatgaaatcaatgggataaaaataataaattaaaggcgtctagacagagaaatcatgtggcctgtgcaggtgggagaatcggaatgccctcagccttctcaatggcgacattgaagaagaccatagatagaatacacctgttgaattctgaagggaaagtcatttccaaactaccaatcaagtatgattgataaaataaagatattttctcacatgcaaaatctcaaaaccttgatttcctgttcaccttttcttggagaataaaccaggaaaaagaaaaatgaggactttgttaaaacagtgatcaacacaggaaagaagcaaatagaatccccaggatgaccacaaagggaggtctgaggaatcttgggaacatgatgtctacatcagagctgaagaatgaagactccaagaggaaggtcttctagaaataaaagagggttggctgggcacggtgtatcatgcctgtaatcccagcactctggaagacagaagcaggcggatcacttgaggtcgggagtttgaggtcggcttagccaacatggtgaaactccatctctactaaaaatacaaaaattagccaggcatgttggtgcataattgtagtcccagctacttgggaggctgaggtaggagaatcgtttgaacccaggaggcggaggctgcaagtgagccgagattgcaccactgcactccagcctgggagacagagcaagactctgtctcaaaaaaataaaaggattgatagattatttgatggaattcattgtgtgaaaaactggtttgagatgtgttttcttttcctttttttttttttttttttttttttttttttttttttttttgagacgaagtcttgctctgtcacccaggctggagtgcaatggtgcgatctcagctcactgcaatctccacctcccgggttcaagcaattctcctgcctcagcctcccaagtagctgggattacaggtgccaacaccatacctggctaatttttgtatttttagtagagatggggtttcaccatgttggccaggctggtctcgaactcttgacctcaggcgatccacctgcctaggcctaccaaagttctgggattataggtgtgagccaccgctcctggccttgagaggtgttttaaagaacattggagcatgtagaaaacttagcaagaggtttgttcaaacaaagacacccaaataaaaagagagagacagatggacatcttatgaaaaaaaaaacaaacagttacatgacaaaggaaatgaaagcgcaatatgcaaagttgcaataaccacagtactgaatatgggtttaaccaaatatgtcacaaaactatttcaggagagtagaagagtgtgtcaggagaggaaatgtgtaggggtgagggatgataaaagaaagccaaatcctcatcttctatagtagagagttagcggataaaacctaaaaacaatacatcaagaaatacttacacttatggaaggaaataccagaagttaaaaggggttacttctgggacatcagacaccagactgcagggaagggctgcctcttgtattaacaagcttccagtataatttgctttttaaaaataggtccatgcattattttaataaaaattaggctgggcgtggtggctcaggcctgtaatcccagcactttgggaggctgaggcggtgtggatcacttgaggtcaggagttcaagaccagcctggcctacatggtgaaacgccgtctctactgaaaaatacaaaaattagctaggcgcggtggcaggcgcctgtaatcccagctactcgggaggttgaggcacgagaatcgcttgaacctgggaagcagaggttgcagtgagccgagattgcaccattgtactgtagcctgggagacagagcaagactccgtctaagaaaaaaaaaaaaattaacacttaatttaataacaaagccacaaagcataggaagagaagacaatggagatgtcagcatgtgagaggtcaataggagaaaagtaagaaatgaacaaagaagagtccagtctcattcctgaacttccaagcatagttgttgtctgaaaatgaatttgttaactaatcatacatagacatgtgatgtctctttaattcttgtcttgatcttttgtcaaaatctccattattttttcccacatagcttctttccataattagattttaagatcccagaggaaataagtggtgtcttatactttttataaccttcctgtatcaaaacagaagacagaaagtgctcaataaatattggatgaattgtaactaaatatcaaatagccatgatttcattgtcatttgttgtcaaagccaaacttcaaaaatcgtaaactccatctaaagaaaagagaatcagatgccatatatatttctgccttataaaggtttttgagggagaatacagtcacgtctaatagtctaaaaagtcaaacttacccacttaatcattgtttttcaaggtcacttctcaaaagataatctaatttaaagcaggtgcaatatctagagtcagaggatctattatccaatatttgctgtttttcaaaaagacttataaatttagtttggaagtataataaggttttttattgattgatttttaatcaagatatgcaatctcattttccatttttatactttccatttttgattaccttgttttctttttatcttattttgaaagagaagtgcttggtgttttaaatctcagaggaaagaacacactgaaatgcaatgcctttcataataatcagagttctctaaattctaaattatgtaacccactttaatatagcatttagcatattgttgagtaagtacctcctaagaagaggaaatctctgtaataatatccttgagttttcattacaggtatcagcataaataaacttcaaaaacacacttttcttgtttttagctgatcaaattaatacaagggtcatggcactgtcatatttctttggtttcttttttttcttttttttttaaactcttcatgatcttcacaagataatactattaggtggctgaaaatttgtggcagagtccttaccggcatgcctgaaagacacaggtgaatacacgattttctaggatgatcctgagcaaacatatattttaaatataatttgcatacaataacgtacacaattttttaagtgtacaggttgatgcaattcgacaaaactatattactctagcctgattaagacttggaacattttcattatccagaaagttccctcatgcctcaccccacctcccatagacatgctatttttctaatataaaaatttagtagtaaaattaacaggtaataggatagatttatatctctatatatatgtctttatgtatactttataggaaatactgctatactgttttccaaaagggttgtctcattttctattctcaccagcaaggtatgagcattttatactggccaatgcttttaattgtcatttttttttattctagccattctaatgggtctctcattgtggttttaatttgtgtttccctgattattaatgatgttgagcatctttttatgcacttgtcagctatttgtatattttcttttacccagtttctgttcaaattttttgcccattttcattggatttttgtttttttattattcaattgtgttccaggataaaatttttgacctaaataaaattttggtcctggccaccagctctctgccaaccctagtgcaaatggtccatttactcacttattccacagccattttactaagcacctactgagctccagtagttataaggataagacacagcctctgctttaaaaaggttacagtcaaatttaggagaaatgtgaataagtaactgtaacataagtttaatgtaaaaagccataggagatatttagagactgaacatgccatttctagttagggtgatcagcaaaagctttattaaaggagatagtatttgagatgggcttcaggtgaggagcagaattgcaacagacagtgatagagttatgagagaaaacaaaggcatgtctataggaaaacatgggatgtgttcagaggaaaaaaaattacataattcaggcaaaaggatagtgttgggatgttgtgttgaaatcatattatggacaacctaatctgacgcagcaggtaaagatggtccctgtggaagtagtagtaatagttgcataacagattaaagtttgtggccctcaactcgcctcagccctgactatattattgctgatacctctgtcacagccactgagctgggactgctaatctgcacctcctggcaatttgacagggactggatctccctctgaggggagggaaattgagccccaaatacctcatcagcctggagctccttgactttctttctgtgcttaccaagtgaagctcttggtgcagctcccttggagaagggaacctcctgcagatgcaaagccaggggaggcttgcatgctaggctgccctgctcaccgactgtgaaatgagttgcaaacacaagacaaactgccgtcttgcacacctagcttgggcaccaagccagacccatgccaaaggagccgagttgttggggaagcaactgaagtaggtcatccctcctaagtcacacgctcacatctccagaggcacagcaaagggtctgcaaggaagatcatgaaagaatttgaagagagagagagtaggcaatgatctttccagaatggtgtgcatgctgacttcttgacaagaacagggaatggtctgcttcagccctaggaattttcagaacagaagagtcacattgacaactcaggatacttggtttcccccaaaatcctaatttattgattggtagcatctcctactaccacagccactattatgagaaaaaagaattaatacattaaatcacagcaatctatattggcaaggttactttcataactattgagaaattatttgcagagcagtccccaactagtgggttgcctgctggtgggagagggataaagcagttagtgcaaagatcctcaaaatcatacaaacctttgtagctcttcaactgactaacagtgcaactactatcatccccgaaagatttttactttaaataaaagttctccaaaacaccaggagccactgtctagagcaatggcctcaaatggtcatgcattttatattaggggattcagtctgagtaaatgtttcctatctatgccaggccaaaaagtaaactagatagcttttcttctctaaaaataatttgcaaattcataaaatatttctttagcatggttttgctaaagttacttatttaagtaagggctttttaccttgacaaaaactggtagaacataaaagaatttttgctgagaatgaatactaggaaaacaacactgccaaaatgttctaaaccttgtaaattctgaaccattttattaactaattatccctctttagccaggagctcgtaacagtaaagaatctgaagtttgttctttgttgagcaagtaggacgataattacttcttcactgttccttctttgcaattttatgtataaataactctaccttttagtgagtgcccgctaggctctgtgctatttttacataaatttgatttcagccttccaaccccaaaagattctgacttctccacacactcttctcaattttgggtgattttgcccatttcaagtctcaattatctgtataatgaaagaagagaaacaagactgcataggaccaaatagtaaaggcaaaagccatgtatactatgttctgtagcaggttttacttgtgattttacaattaattggaggatgctggcaacaggctaaataatgacaggtataaatcaaccttggattaaatttttgaataaataacagaaacacaaaaagcagtttttagcatgtagaattaggcacacagttcttcccaagtaaatgtggatgggtactaaatgttttcacttttctgggagtttactcctagatcaggtgggaggaaataatcaagcattgtcatctgacacactatctctgccaggacatggaaatctattttgttaattacattctgcctctgagtctaaaagaaataaacacttaaaaaaaagtggaccttttatctcccacaagcagcattgagcctgacccttttgccagtatgatgatgatcattttgggtgtgtgtaggggttgtgaggttgagaagggaggggattcaacattgaggaggaggctatgcttgtgtttcagcttcagactattggcagttgatacggtttggctgtgtccccacccaaatctcatcttgaatttttgctcccacaattcccacatgttgtgggagggacccagtgggagataattgaatcatggaggtggttcttctatactgttctcatggtagtgaataagtctcacaaaatctgatcgttttataaggggttccccctttcacttggctctcattccctctcttgcctgccgccatgtaagacgtgccttttgccttttgccgtccaccatgattgtgaggtgggaggcaacgtggaactgtgagtccacattgggcaactgtgttccccagccacgtggaactgtgagtccattaaacctttttctttataaattacccagtctctggtatgtctttatcagcagtgtgaaaatggactaaaaattgccctggtttccttttgtcactgtgtggtagaatgctgactcaccaacttacaggatacggcaattttccattgcagaatccattatgttgcaatagtaaacgctgaaagatttcatagatcatggaaagtataggcttataagaaatgattgtagtaatatctgagttataaagcaattttatttgtacacatagactttaagaaaagattcataatttctgatcaattttctgaatagtcagacacgaattttcttgttaataataagtcatttttgagcattagctttgtgctgggttctttacagatagtctatcactttgggcctaactattcaatagaaagtattcttattcctatttaacaaataaggaaactggtgcagagatatcaggtaagtcccccgaggtcacctggccataagggaaatactaggatagaaattcagtattaactaactccaaaacacgatctcttcctggtacatcaggtcaaccccttttatgtaagattattcttgcacctgttgtaattctgcaactttacttgatcatcttcttaaatttctgcttaaaagcctccagtggtgctttaccatcttcatttttaaagagacaaagtcctcacaaatagccttcaaagacctgtgctgtttgtctcccacccatgccacgtattctctcatcctacctcctatttctttcctcctcatggttctaccccagccacactgaataggacacatggcatgttcccaccttaggggttgggcactagttgttttctctgccagagagccctctccccagatatccatagctgtctccttcgtctgatacaagtctttgcttaagggtaagtttctcattgagatcttccctgaatgccctatttaagtttgcaaactgcccaccactcttcatcccacttccctgttttatttttccccatgatgcttattaccatctgacattctagacatttgcctacagtggtaccccctttactcatggaggatatgctccgagacccacaggggatgactgaaacagaggatactccctaaccctatatataatatttttttcctccaacactgctcctgtcctaactttggttatttcaatatccacatggattatctttcctataccttgacctccgagctccactcccccaataagcctgcccttcattgtacttccaggcttcactagacctgtcatgaccaatgactacaaagcctccataaccttaatcttaaacatcctgctctctttctatctctttccttagaatacattaatccttcaattttttggttctgccaggatctacagtctgttactaacatttcactgtctctcacctccctcatatcctcactctttccttatgcagcttaaatgccatgttctgtcattataaacactgacttgtatacgcagccaactaactaccttgcctctctgtctcatcagcctcttctggccaagcccaaccttggttaggtctaaccacccacctgctgcaggcctgggcttttgcagctgaacatagcaagtgatttcaccttaaatcattcaccccaagcaggctctacctgctgcacagcaatcacatcccacttccccattccctctcccagtctgttggatgaccatgtcctatggcctcccctctcttcagttctctagtcctctccctcattctcatgtccacttgatcaccttgatttccatttcactgagcataaaatcaatccaaagagaactcctcatgtcccactaccacatctacccatcttcctgtgtctatgcccacatcctttctcctctcttccgtattttaagtcactttttaaggctggccccttcaccggggccctagatcccatcgcctctcaaaaactcaaggacattgcttcagcaatcctctcccttcttccctaatcatctgtattcccctccctactaagttatttcccatcagtgtataaacatgctgtagtttcttccatcttaaaacaatgtttcgtgaatatggattaaaagacacctaaaagacatcagttgaatgccatgtctgggtctatttggatctgacttaaacaaggtaagaactaccttgcctttcttggaaaactgatgattgaatattacacggccttaaagagttattgttttagatgttatttatttttaaaagattccttaattcttagaaaatattgaaatatttataattttaaaatatcccttccttcaaatctacttccacctactgccctatttatctgtgtctttttgcagcaactatcccaatttctgttatgctcactccaatcaggttttcacttcccaccatgccactaaaactccgtttaccaggtcaacagtgacttccacaattgctaaatcaagtggccaattagtacttatttcagaggcatttgactcagttgctgactccatcctccttggaatgtattcttcttttggcttccaaatcactactctctcttggtttttctccatacctctgattgttccttcctactctgtttttctagctcttcttcttcttcttcctgatctcttaatgttggagtgccccaggcctccatctttgatattctttttatctatatcttcattcacttccttggtgatcttatccacttgtatggatttacctaatgcctatgatacccaaatagaaatctccagtccagacaattctcccaaattccacgcttataaaacactgcttgggccgggcgcggtggctcacgcctgtaatcccagcactttgggaggccgaggcgggtggatcatgaggtcaggagatcgagaccatcctggctaacaaggtgaaaccccgtctctactaaaaatacaaaaaattagccgggcgcggtggcgggtgcctgtagtcccagctactcgggaggctgaggcaggagaatggcgtgaacccgggaagcggagcttgcagtgagccgagattgcgccactgcagtccgcagtccggcctgggcgacagagcgagactccgtctccaaaaaaaaaaaaaaaaaaaaacactgcttgactgccgtcaccatctggatgtctaataggcatctcaaacttgacatgcccaaaagtgaatttctgatcattccctccaaacctgcctcacctgcagccttccccatctcaggaaatggcaacttcattctcccagctgcagactagaaatcttggagtcattctcaacccttctctttctcacataccccatatcccatccatcagaaagtcccaatggctctacttttcaaatatctacaaactccaaccattttcagtatctccactgctaccaccctagtccaaagcaccatcctttctatttttgatctccctgtttccacgccttactcactttggtaactttcaaagcagcagccagcatgatcctttttaaataagtcagattataccattcctctgcagccttttgatctcacttccatgaaaatgtaatgttctttcgacagcctacaaggccacacatgatctggctcccaatacgtccgctgacttctcccacatgttctatgccctcaccgtctcagcaccagcaacactggcctccttgcttcctcaaatataccaggtgcactcctcacagtctttacactgctggtcctttggcctgcaatgcttttgctccagatatcagcttggctgtctccctcacctccttcagacacctcctcaactatctcctcaatgaggccttccctgacactgtcccctcatctctcattgtgacccactcctggtctctgccttttctcttccctgttccccttttccccatagtacttatcattatcatctaacatactgtatgtcttcacttttttaagaaaaaattacctttttctccactagaatgtaagcatgaggagagcaggaatttctgcctgtttagtttactattatagccctagcttctagaactatacttgagacatagacagcaatcaatacattctgtacttgctaaataaatgcatattgcatttctaaattatttaaacatattaatagacaagctcactgtcttgaatttataccttttaaacctttaacttatttttcaattcaatattaataaattaattacattgtattttaaacagtaaattaatctttctgctcttagatgcatttcatttaccaatttacagatgtaactgcgcatttataatggagcagcttccacatattgacctttgggaaaacctactttcatgacaagcaaacagaaaagacacttgcaattgctgttggaacactggcaagccaattagtgcttctttaatttgcaattgaatttatcataaattaatcttaaataataatcaatgacaaaatatctctcaaaaaataaaaatagttccaatgtttggggatactagagggcataattgcttttgaggttcaatttgctcttcctatgacattaaacgtagttagctcttttttttcctggcatcattaaaatctcatgatattcttctctgtatataatactgcaggactcactctctccaaattcaggtcctgttactttcattagacacttaactcgagattattcccacgacctaggcaattagacttcaaaccatctgccagactcagctcagctgcattctgatttgcgagtaaatacttgctagagacaaattctcatggagttcaatgcccattgcttgatgagctctttgaagagagtgccagagtcaacaaaacagagggaagccctccagcttgtagctttctatccatatggctacatccacaagtgatttcagaccccttcatcacccataacaactctttatattcttcttactcagaaaaaaaaaaaaatactacatgttgacaggtttattttaggaaagaaggtacacactatttaaaaatcctggatttgaagtaaccaaataaaactttgggtgagtgggaaaaaatacagcctcaaataacttaaaatgattcctgacttgttgagtttgaggatctcttcagactgagatttattctccgacaactccagaattgggagactatcaaatgtggctcagtactcaacaagtatttgttccaagctcttgcacagttctgtgtgctaaatacagtagtgattaaaagttaaagatgaagcattacacctaagattttattttctctccctcctgagatccccttaaaaagatgagaaaggagtttttcctatttatacatccacaagaatttttactatgcatacattcacagaagacaggtgagagcccatccatggtctgaagagctacagaattcagaatgaagaaaaatagaaaagaaggaaggcaaaactcacagtactcagagggagcgtagtcagagactgctgccttgctctgtaaaatctctgggaggaataggacttagaggtgatgggtatggcatgtggtaagagtaagacatgggactgaaaacagaagggttaactgaaagtttatatctggaagcattaatcctgtactctatttatgcaaaattccaacagccaagtacctccccactaagctgaagaggttgagaaatcctaaaacaaaaaagacattcacattctggcactttagggtctaccaacataatggccagctccctaaacaattaccctaaagcaaagtctgccaacagaaaagcaccctcttaaatacgaatgtgtgcaaccagagatctccagtcaaagaatgctcctaacatggaagatcaaaaccaagatacacaaatggcggggaaatgagcctggagaaatcaaagaaatcacagaaaagagaaaggaacctttaacaaagcaataattaaggacctgagataaatctgagaacacatttcatccctatcactataacaatcatgataataataataaaaataatagctaatatttattgagaacacactaagagctactgttcaacaaactcaagacaaggaaactgcagcacacaaagtttcagtgactgatagtaagcacagaagccagggtttaagtccagatagtgtgaatttaaaacccatgttcctaaacaaaggggtatgctttctcaaatatgctggttttatttcattttattttttattcttttttattttttatttttagaaggagtttcgctcttgttgcccaggctggagtgcaatggtgcaatctcggctcaccacgacctccacttcccgggttcaagcgattttctcctgcctcagcctcccgagtagctaggattacaggcatgtgccaccatgcccggctaattttgaatttttagtagatactggtttctccatgttggtcaggctggtctcaaactcccaacctcaggtgatccacccgcctcagcctcccaaagtgctgcgattacagatgtgagccaccgcacccaaccaaatacgctgtttttaaaaggaacagaacacaagaaagtgctcttaaaaaatctattcaggtatttaacaagtatgtgtttagagtcttctgttggctaaacaccagtctaggtaccaaaaatacggcaataaacagaacaggcagtatttcagctctcatgaagctaaaattaaaaatttagtagaagagatggaagatgcactcaaggaattttaccaggcaatttaataaaagtaataggagaaaattccaagaaaaaatggagatatgtctgatggaccaggaggtgccttttcctcttattaagaattccagagacaaaacagataaaatgagaataagttatcccataaacaatacaagaaaatttcctagcagtgaagaacaaaggtcttcagattgaaggggcctgtcttcccccagtgcccattataataaatggaaaaagattcctatcaaggtacaccttcatgaaatgtcacaccagggataaagagaaggtctgagaagcttccagaagtaataacaagtcaatgaccaaagaataagaatttgaatggggtcatacttaccaaaagcatcaatgggtgctagaatatgataaagcctttaaaattctgaagaaaggcgatttgcaaccttaaattttatagccagctaaagtaccaattgaatataagggtagaaaaaaataaggtcattttcagacatgcaaagactcagaaaatatctccttcacacagcctaagaaattacttgaaaatgtgctctaggagagaaaatcaagaaaaaagatgacacaagattcagaaagagactcccactggggagaggggaaatagtctcctaagaagcttgaacttcattctgtagatattaaaggaggcatggatttcaagctggaaagcaatataagatctgtgttttagaaaggacattctttcctaagtctttcctaatgtcctttagaaaaaacattctttcctaagttcctaaaatcagaatagtggaagatttctgagaccagtcacaaagtttttgcaaaactcaggtgaaatgtagttcagacctaaactaaggtggtagcaatgagaaccatgaaattgtagatgtgcaacagctgggctcacatctgattggggtggggggttcttagcacaatttcatgttgttgtaaatattcacggcatgaacgtagggcaagggcaagagagactccacaaggacatcgaagcttcaagccctggaaagtggtagatggaagacaagaaataaagacattccagtaagcttcaaggcaagaatcattctatttgagatattttgagtggagaggcagtgctagatccatagagaagtacagaggagctcctacctttctgtctgatagcaaccagactgtctgattaaaactgcagatcactgcaagggtggttaaatcaaaaaagaaaaaaggcagttgttccccctgcttgaccctgaaagtgcagagatagtgtgggtggactgcacaggaacacttaaggtgcagcatgcctaatggatacttagaacgatgacaagtgaggattaagatgtcttcaagtataatagattctaattttgtctgtaagtggccttagagctctgagatgagactacagaggtagtccagtgctagatctgcaagaccttaaagggcatggtaggaagcgtggatgttattcatggtacgttgagaagtcactgtaggcctttaggcaggaaagtgacattactcaattcatatgttatgattactctggctactatgtgaggaatggattgaaaaagaataaaagtggacaggaaagatatttcagtaagagataatgttagcttggactagaaagcttacactggagatgcaaatacgtggatttgagattcctttggagttcagaatcataggtgttttgcaagattaaatgtggatgggacaatggtcttgaggaaatccaacattcctcaaggttactaatttgagcaatcaagtggatgagagtgtcaattaccatgttggggggaaatagaggaggagcaggttgagctaagggcaaaggatgaaaagataagttttgaaaggccctattaagttggagacgcctgtgaggcatccaggtggagatatcaaataagcagttggatatacaagttgaggtctggactggagctgtatttgccaacttcattgcttttggcttcagctcagataaacttcaaattgggacaaggaggaaattaacaattattgagcacctaccatatgccaagcacccacatttcccaacatctactttctccttgcctgcccaagcaccctcccagttcagcccgagtgggacctaacttagaggccacctgggatatgtcattacatatactcagacaaactttggaatcttccctcccagattcctaatgagtccatggagacttactgcacctggatctgtgttcaaagactccaaagacctgaaagtgaagactagctcctgggacactgaagctgagaactccagacccaaatgatacttatgactccacccttggttcactgtatctttttggacacaacatcccttatttctttgtctgaattttagtatctgcccgcttcataaaaatgctttgagaattgaaaccagcttctgaatcacctggagagcatcttaaataatgcagattcccagcctccacaaacagagattataattcatttggtctggaatgtgtctcaatctgtattacaggtgattctgatgctggtccagagtgatccctggactagaaatgctgatttgcagagtgataaactgccagtttttccccaaattatctgcctcaatgctgtctccatcacttagaacattagggcagttttaaaagaaggcaccgaattctttgacactcttcccattaagaggtggactgtatgtcctctgcccttgaatttgatagttctcttagaatctggctgacataatgtgggaaggtcaagccacatggagtagccacagcaacagtcccagctgagctcagtctttgagtcacctcagccctggcaccagacatgccagtgaaggaaattgcagataatcccaacccccaggcattgagtcatcccagactccagatcttcccagctgacgccccagacatcacagaacagagacaacctatccccaccattccctgttcaaattaatgatccataaaacctatgctcataataaaaagattgttgctttatgccacttagttttggggtgttttgtcacgcagtaactgaaataattactaacatgttttctcaagaaatatgtattaaaatgcaaacacattacttggatgaactctttcagatgaacacacacaatcagtgtatctagcagacaacaaagcagggaaatgagccatgagatgctctcccgtttcactgacgtgaaagcatcactgggaaaggcaacctaagatgcttccagaaagctggaattgaaagatggccacaccttgaagacagcatggctaaaagagaaagacatgcctcaaaaaggacggatgaggccagagagcaaacccagattcattttcttcacaactgtgcttaagtctggctcaaaagtccctccactctctcactaaccgcaaaggtgtttatttatgccagtttataaatgtctaatgttaaaaatcacctgggaataatacaggaacaagcgccaagggtaatttttttttttttttttttttgagacagagtctcactttgtcacccaggctggagtacaatggcgtggtctcagctcactgcaacttccgcctcccaggttgaagtgattctcccgcctcagcctcctgagtagctgggactacaggcacgtgccaccatacccggctaatttttgtgtttttagtagagatggggtttcactatgttggccatgctggtcttgaactcctgacctcgtgatccgcccgcctcagcctaccaaagtgctgggattacaggcgtgagctaccgcacccagcagcaccaagggtaattcttaccagcagaccagtttggaaaatgctagattatatatttttttaattaaatacaaaacaaaatagcaactgcaccaaccctttcctcacaagagtaacagtcctgtggtgagaatggggttaatacatgagctttaagttctgacggccttgaaccttgagaatgtaaaccccagctaagtccaattacaacgatgtggggggaggaaatggaaaataatggaattcactagctaattggatactattaattatattaaatattttaaatggaattatcttctatgaggaatattttaattgacaaaatataaaataggagggatattaggttaaatattcatggccttattcaagctattaatggtgccaataaaaatgatggagcaagacatggaacctggactctctgggattcagaaaagagcagagaatgccacactaatgccacgaattcattctattttagtaactaacactgatgtctacatgttcccagcctgaccaccacccccctcaccccattgttctcagaagtgatttgaatctgatttcacattgttaatatcaacacttgagttttctttccaagaatcaatttacagtcttctaaagacactggagtggcgggggatggggggaaatgttgtcagtcatgaattcccaatgtaactggttatgactctgaggtctgcatcattatcagattttcatgatactgatgttgattcatatcagtgagcagtttatcagtccccaaactctagtccccacagcagctgatagcaaagtagtccccttcgtctctgttctacttcatttctcttgcctcttgagaccctttcatagtcacatggtggcatgttgcagagtaaaattgacatctctctctgattccaagagtttgcatgtattgtgatggatagaataaaatgactgtggaaatagcatttgtactactggatactggaattccaaggagttcctataacacaggcttagaagcctaatatccatccctccttagaccagaagctcagcttatgtactcagtagaagaaaggagcatatcatctcccaattaacctcaggcctgtttgagtttctggccaaggctgagaaggccctggctgctcactgcctctctgcatttttctgttctctgcctcccagggacgtgtctcaaaccagtgtcactgcccttccatccaaaggcctggagcacctgaaggaactgatagcaagaaacacctggactcttaagaaacttccactttccttgagtttccttcacctcacacgggctgacctttcttacccaagccactgctgtgcttttaagaatcagaagaaaatcagagggtaagtggcagggacccggcataagtgacaaaagaccttggtggaagtggaattcatttcttggttttggggaagatgcttcctggtttgaaaaccaggtggagaggaaattggaagcatccatatgaaacaggaaatccatgggacacagtgaccctgcggacccaaagtgggtgcagctgagaaataaggcaattgctgctggatagcggtagagcagaggaggtgacagatggcacaggagagagaaacacaaccagatctcatagaatcttgtagaggttatgtagatatgatgtccggtttccaggtacaattcagaattagatactgcaacacatattagaccccagacaccacaaccatgagaacagacttataaacaacacaaacagttgggttacctgattggtttgggccttgcaaatgtcatagctccctggttacatgcctgcaggctttggagtcagctgggtttataccgcagctctgccatttttcaagctgtgttatcccagcctagttacttaaccactctgagtctttgggaatggagatcctaatactaacattcatagcagttttgagaagattaaatgagaaactgaatggaaaacactggaatggaatggcctggaatattataagatcttcattaatattaactatgatatacagtatgtgcacatcaggctgcttatgagcctgcgaaggaggaattgccttcattttctctccaggctttctctgattcttttacttttttgcttttactctgcattatttcccccattgtgtcttgtacaatctcctgttctcctaatccaccttcatcatctctattcagtcctcctcagcttctatgtatttagtgattgacttactacacacataattgcagtcaggaaaatatcagatctaggtgtgagggcagaagctaaaacagccatacaaagaaggccaatatggtggccgggcacagtggctcacgcctgtaatcccagcactttgggaggctgagatggccagatcatctgaggtcaggagttcgagaccggccaggccaacatggtgaaaccccgtctgtactaaaaatacaaaaaacaaaattagccagatgtggtggtgggttcctgtaatcccagctactggagaggctgaggcagaagaattgcttgaacccggtaggcggaggttgcagtgagccgagatcgtgccagtgcactccagcctgggcaacaaagcaagattctgagattccatcacacacaggcacatgcacacacacacacaaagaaggccaatatgggcatcatagctgcaaaaagccaggagtggggtagaggatggtgatagtggactctacactgatgccatgcggcattgagaaggactggacaagggctgggtgggaggcttaagtggacctcaggggcagggtctagatttttccctagcctccagttgagaagagcaagtccattggacattttaagcagaacccaagagatcactcaaactctgctcagcagctgaggcaagttaaagaatcccttttgttgtgagtctggtgagcaaggaaaaaactaaatcttatttccacaagcatgcctgtatggtagtgtccatttgttcatttgttaaacagatatttactgagcaccttctatgtgcctggctgttgtaaatagaacagacaagaattccctcttgtattttgcttactgtctaatggaggaagtcagaaaataaacaggctggccgggggcagtggctcacttctgtaatcctagcactttgggaggcagaggtgggcggatcacttgaggtcaagagttcaagcccagcctggccaacatggtgaaaccctgtatctactaaaaatacataaatgttttatttttaaaatattcagtttgaaactaaataatgatgagtagaggcagccatgggtttttcaggcaatgggaacatagggttttagagctttgaataggaataataataacaataaccaccatatggcactcacaaagctgcaggtgctattgtaagagccttaaaaagataaattcattgaatcctttaataaccctatatgaaatagtcactcccattgtcccatgttacaaatgagttaaccaaacttcatgggcctacccaagctagtcaataattgagccaggttcccaccaaggcgactggctccagcatccacattttttttttaaacagagtctcactctgtcgccactcagcctggaatgcagtggcgcaatcttgactcactgcaacctccacctcccaggtttaagcgattctcctgcctcagcctcccaagtagctggaattacaggcacgtgccactacgcctggctaatttttggattttcagtagagatggggtttcaccatgttggccaggctggttcaagctcctgacctcaagtgatgtgcctgccttggcctcccaaagtgctgggattgagtcactacaggtgtgagccagcacacttggccacttttttttttttaatcactgttcttgaagtggttgcagaagagaaataagaccaatgccactggagcacagtaggggaggggaggtcataggaatgatgtcacagaaacaggcctgcctggatcctgtagaaccttatagaattatgtacatcatagtaagtagtttgcacattttcataaatgtgggaaccattcgtgggttttaaacaagcattcttttttttttttttttttttgagacagggtctcactctgtcatccaggctagagtatagtggcctgatctcgcctcactgcagctttgacctccccaggctcaggtgattttcccacctcagcctcccgagtagctacgaccataggcacataccaccatgcccagccaatgtttgcattttttatagagatgggatttcaccatgttgcccaggctggtctcaaactcctaggctcaagcaatccacctgccttggcctcccaaagtgctgggattacagtcatgagccactgcgcccagcctggcactgactcttttctgttgccttgcagaatccttgagtccttgatgtgtaatgagagcagtatgcagagcttgcgccagagaaaatctgtgaatgccttgaatagccccctccaccaggaatatgaagagaatctgggtgacagcattgttgggtacaaggaaaagtccaagttccaggatactcataacaacgctcattattacgtcttctttgaagaacaagaggatgagatcattggttttggccaggagctcaaaaacccccaggaagagactctacaagcttttgacagccattatgactacaccatatgtggggacagtgaagacatggtgtgtacccccaagtccgatgagttcaacccgtgtgaagacataatgggctacaagttcctgagaattgtggtgtggttcgttagtctgctggctctcctgggcaatgtctttgtcctgcttattctcctcaccagccactacaaactgaacgtcccccgctttctcatgtgcaacctggcctttgcggatttctgcatggggatgtacctgctcctcatcgcctctgtagacctctacactcactctgagtactacaaccatgccatcgactggcagacaggccctgggtgcaacacggctggtttcttcactgtctttgcaagcgagttatcggtgtatacgctgacggtcatcaccctggagcgctggtatgccatcaccttcgccatgcgcctggaccggaagatccgcctcaggcacgcatgtgccatcatggttgggggctgggtttgctgcttccttctcgccctgcttcctttggtgggaataagtagctatgccaaagtcagtatctgcctgcccatggacaccgagacccctcttgctctggcatatattgtttttgttctgacgctcaacatagttgccttcgtcatcgtctgctgctgttatgtgaagatctacatcacagtccgaaatccgcagtacaacccaggggacaaagataccaaaattgccaagaggatggctgtgttgatcttcaccgacttcatatgcatggccccaatctcattctatgctctgtcagcaattctgaacaagcctctcatcactgttagcaactccaaaatcttgctggtactcttctatccacttaactcctgtgccaatccattcctctatgctattttcaccaaggccttccagagggatgtgttcatcctactcagcaagtttggcatctgtaaacgccaggctcaggcataccgggggcagagggttcctccaaagaacagcactgatattcaggttcaaaaggttacccacgagatgaggcagggtctccacaacatggaagatgtctatgaactgattgaaaactcccatctaaccccaaagaagcaaggccaaatctcagaagagtatatgcaaacggttttgtaagttaacactacactactcacaatggtaggggaacttacaaaataatagtttcttgaatatgcattccaatcccatgacacccccaacacatagctgccctcactcttgtgcaggcgatgtttcaatgtttcatggggcaagagtttatctctggagagtgattagtattaacctaatcattgcccccaagaaggaagttaggctaccagcatatttgaatgccaggtgaaatcaaaataatctacactatctagaagactttcttgatgccaagtccagagatgtcattgtgtaggatgttcagtaaatattaactgagctatgtcaatatagagcttctcagttttgtataacatttcatactaaagattcagcaaatggaaaatgctattaatttggttggtgaccacaagataaaatcagtcccacgttggctcagttcaactagatgttccctgatacaaagagaacttgatttccttaaaactgaaaagccaaacacagctagctgtcatacaagaaacagctattatgagacatgaaggagggtaagaattagctttaagttttgttttgctttgttttgttttttaactcaacctattaatcatctcttcacaagaatccacctgatgtgaccaagctattatgtgttgcctggaaaaactggcaagatttcagcttatgtggcctagcaaactaagaattgctcttcttggccagcctcatagcataaaagatgtgaactctaggaagtctttctgagtagcaataagtgggaattatgggcagagcacactcaatcccctgttgattaataaaacaggctggacactaattaactatgggacttaaatctgtagaaatgaaggagtccaatagcttcttccaattttaaaactctagtacatccctttccctcaaatatatatttctaagataaagagaaagaagagcactaagtaagtagaatctgtttttcctattttgtagggctgctgactcctagtccttgaagcctagacacatgacccaggaaatttttcctttgtttcacttttgattatgatgtctgagccaaaaattcaattaagtaaacatactcgcctggatctgaatcattcatttaattactagatctacccagctgttatatcaggccaaaaacagattcgtgtttatataaaagagtaaacgatggttgcaaattttggctatttagagttgctacttcactatgaagagtcacttcaaaacacttcgcttgtctttagggatgatttttgccatttccagtccacggtatgatactaaagctgtcaagagaggtttcttcttttctgaaactgccagctctttccagccctgttgatcactggacataaagcttcttttccccaataattcttctttacttaaaatagtcaggatctttatctacagatgtactctccaggttacctgtgatgatagccccctaatgtcctgctagaaaagtctccaagcagagatgacattacttctgaatgctcataaaccacaccatgaaataaaagctctttgttgttttaagattgtgaagtgtcgttaatgggtccccacagatggtccctgctggactcacctggaatctctccacagccatacccactcatcactatcattgagacctgcacatcttaatagaaatattataaacatcgaaaatcatgacttacctagaagttcgcttgtaactaatgaaattaaacaaatgtgttgccttttgtcatgtgtttctctcctgtgacatttcaaaatatcacatcttgataaataatgtgtttcatcttgaatagctgaactaattgctttggaaacagagtcctagaaaagtgacttcaacagaattgttactaaaatttgcactcacaacatgaaataaattttcttcctatggaataatcgtg

SEQ ID NO: 82 - DNA, 139517 bp, Mus musculus
  source 1..139517: mol_type = genomic DNA; note = Mus musculus strain C57BL/6J
tgcacccgggtctcttccagcgtcagacgcagggcactgagaatgtggcgacagcgcgcaacgatgaagtagcccagagggtcccttggaaaatgaggccagggtccctgctgctgcttgttctgctgctcgccctgtccaggagcctgcggggcaaagagtgtgcgtctccaccctgtgagtgtcaccaggaggacgacttcagagtcacctgcaaggagctccaccgaatccccagcctgccgcccagcacccagactctgtgagtagccaaggccaagaccccccccccccgagaaattcgtggtgtgtgttggggtgtgcgcggatatctggtcagtccctgtacaaattcaatcccccatgctcgggaaggtcagctatgctgctgacacgggggacagaatccctaataaaactttggttcaagatacctgggagttgtgcttaataaaaagttacaagtagtctgtctacattgtgccaactcctagtgcccgctggattctagtttcacatcaagtaatagttagacacacacacaaccttaagaattaacttttaaaacttatcttagaaaatacaattgcttctcttcccaaattcccctgtaagtatccctagatgagaaattaccttggccatttgacttatcaaataattgttaaaagcttgatcagagacggcatagtggctctcgactttaatcccagcagtcaagagactttctgtgaatttctgtgagttccagtccagcttggtcagcatagtgagttccaaggtagccagggctatgtagacagactctgtctataagaaggaaacaaaacaaaacaaaacaaaacataatcgggagcctattagaaatgaatccttggacttgtcagaaccaagaagggtttcaaaaaagggggagggttcccctcccattccatctgatctctcctttattctgaactagtctcctgaatgtgtgtgtcccaaaggggtttaactagattgcttacaggagcatacatgagggggttataggagcctgagcagttaccagtggtgaaaccacataaagaaaatgtctctccctcccaaggaaccaaggaaacatcaacatctgttaaatcttcaggtaggggtgggggccttctgagcccttacccactttatggcagtatgctaaagggtttaaacgtactcaggtcatgggcaggcaatcacagcttctattggctcacagccatgtcatgtcaagacagtgttctgccatctccaccccatcctcatttagagtttttgaagagacctctggtttataacgcaaatccttgagttagcctcactttgcagcatccatcaggatgctaaacatcctgggctggctgtttgatatgttgctaacatgctgagggtgtttcttccttagcatgatctacctgtgtactatggtagtgagagtgaagtcgatctcctctctctacactgccgatacaatgcttctgtggtcttatggatgggaaggagagacagttccaatgcagcactggatcttttcttacttgcctctccagggaggcacagggaccgtcattatagcaggggctgtgatggggactgggggagctgctatccctactgcccatttgggacatttgaccatctttgatatgcaggagaactctcactggagaatgacactaggaaacctagacaaagcaagagaacgtaattaaagatttgggcacataaggccaatgagatggcttagtgggtaaaaagagcttgccccacagcacaacaacctgagtttgatccctggaatctatatggtggaaagtgagcactgaatctcaccggttgtcctctgatctccacatgagcaccatagcacacctcccagtgtgtaaatgaataaaaatgcatgtctctgtaggattctctaaaaagtaaagagtaaaacaacagcaacaacgtgtttggcacataattatagataatattacctccaaaccaagcacactaagctggcccatcagtctcgtctattcagaaggttgccaggtactgctcagattgccttaggctgcctctgcataagaggatggcagtctgtgtttgtatgctaactcactttgccttgtcctttagcccagagcaggatgcctggcactgtccccatcagtttcatggtggcagccatgaccacctgaatccactggcacatcctacattgtctcgggtcttgagcgtcaggacaataaagggtttgtctgccatgcggacgtgtgttctgaaatgctgctgagatttctcaggttcaggttttaactgtttgcatgctgcaactaacagttaaattggtgactatctcagtgttttctaaaccaaacagttaagttccaccttcagggtttggcagtagctttccagttgtgctttttgccactcggtgtgcttaaataggtgcatttctgtaactgaagtgaatttatttaggaaagtttgtgtttctgttagaggtggaaggctggacaggctacgtaataggtggtgaccagaaaacatgacagaacaggtttaaaactaagatggcagggtggagcatggactacaatgcctccaccaaggctgcttctctggctgttgagggctttagcttttttacttacagatattgaagtggcagcagatgggtttccaccctgtcactgcctgccatggtttgacgtttagtcaaaccatgctcaagatactttgactatccacatcctacaactactgacttcattagtgcttcccagcactggctgttcttccaaaggaccctggttcaattccacattgtggctcacaactgtctgatatagtactgtgatggtttgaatagatttggactcatgtgtttgaacgcttagctcatagggagtggcactattaggaggtgtggcattattggaggaggtggggccttgttggaggaggtgtggccttattgaaggaagtgtgtcactgtgtaggtgggctttgaggtctcccgtgctcaggctctgcccagtgtggagtccagtctcctcctggttggctaaggaacttagtctccttctgctgcctttggatcaagatgtagaactcttggctgctccagcactaagtctgtctatatgatgccatgcttcccaccacaatgataagagactgaacttctaaaactgtaagcaaacccctaactaaatgttttcctttataagagtttgccttggggccaggtagtgatggtgcacgcctttaatcccagcacttgggaggcagaggcaggcagatttctgagttcgaggccagcctggtctacaaagtgagttccaggacagccagggctacacagagaaaccctttctcgaaaaacaaacaaacaaaaaaagagttgccttggtcttggtgtctcctcacaataataaaaccctaactaaggcagaaatcctctgagaatagaaaaagtagtcactcaagatatggaggctcctcaaaagcagccaaaacaagtgggacatttcttggtcaactctggcttctctctttttaatttttttctttttacttttttcccaccacacaagcgttatacagtgccatgcagtttccagtagtaatgtcccagaacctgtatgttactataactctatttaattatcccagaacttgagtcaaagaggtgacttgaatgtcaagaatgccaggcgctgtgggaggactgtggagtagttaagaaggcagcaatagagtcactcaacagcccagtaacattacagagcaggatcgccgcaacctcctctggcttcggcatgcatgtggatgcacacttgtgcttgcacatacatgtgcacacacaccagaagctgaattctgagatgatgagtggcaggctgcactgaagtggtctgttgtagctgggttcctttttgtgtatatgcaagtgcatgtgtaaatgctcatgcatgtttgtgaaagcatgtaggtacatggatgtatgtgcctttgtgtgtgcatgagaagccagggactgtgtcaggtatcgtgctccaaggcctgaatccagtttttagtgatttccatctctgcaaacaagtgctggctagactgaagagtaattctattttctgatatcacttctgaccaagcggtaagcatagagaaaactaattcccgatgctcataatacatcgttaaataaattactctcgtgcgaataccattggacagtttgtcatcaagatactttgtttccctgtcaacgctgagagagtgcttctgcgaatcaatctacttgattgctgttttctgattgcacaggtgtgcgggtcacacttcaaattcaatcttatcactcaagaagttcagatgtggcctacgggttttccacgctgctgggaacctagggtagtgtgaaaatttatatgcacacaaatcaacaaatttcttacatttctcaaagatctccttgacctgccaagaagttgagaagctgcacattgaaataatctgttggttttctggggcaataagcatacatttggcgcctactctgactccatctattttattataaagaacacaaaacacatgttttagaaataaaccaaactgctcgacctcgggatatgatgctttcccctttatacacaatatgaccagagttactactttcctcgcccgttccttaaaaacactttcacacggaaggtcaccaaaaaccctcggtcttttaagtcaatgttataacaatatattttgtacgcgtctggttcactgtaacatctattaaattcttaacactgaactggcaagatggctcttaagattaaggtacttgcccggccaaccgggtagccctaagctctatccctagattctggagtttggaatatgctgatttaatcaacagataaatgagggagtcttttaagagggaaactgtaatggattaacgaggcaatcttctgagagggtaactgcaatagactctagctgctctgttctcatctcaacagccttctcaagcacttctgggtttatgaacacagtctgtagactggaaaggaaaaaaaacaaaacaaacagaaattctacctttaaaataaacagggcatttgtttgtttgttattttttggaacaggttttctctgtgtagccttgactgtcctaaaatgccctcttgtggaccaggctggtctcaaactcttagaaatcaacctgccttaaagttatgcgccatcatgatggccctgataaataaacagtattttattgaagctgattccttccctttcttcctccccccacctcccctttccctccctccctccttcccttcctcttgtttcttcagtaaatatttatgttaatattagtctgacatcaatgatacatactaaatgacctccttgaccttacattaaaacaggaaaatagctctaatggtcagggtgaggcagagtaaaacataaaaacatggcaggtggaggaaagtgcacatcagaggaggaatataaagacggggagaggccatagaaaggctggaagttgccttcaaaccatcagaatcaatgtctgctatcctatccttggtttgtaaatggccattttatttcatggaactgcaggtggtagagagctgagcccattggccttatttcttattataaaggaactgagtcagcacaggagcaaaagcatcgccttcgcgccctaatcacagcctaaagccttcacttcctcaaacgctcacactggagactccggttccaacccagtgaatttattgaaggagctcaggtattcaacccaaatcggaagggcctcattgaaaaagtgacacaaatgaagtcctggatgaattaaatgtggggaaagagtgggctaggctcatatctggggggataaaatcatgaagaaatgcaaagtttccccgagtgagagttgcaatggagaaaaccgagaaacctgagagacacactgagaaacacaagaagcaacgtggctggagtcgagggagaaagaggaaacagagtcccggggaacacatcgtgctgagctctgtaggtcgtgatgcataacctatagagtattatggtatctgtgtgtatgctcacacacataaaaacacatccatgtatacatagttattttctgagtgagttaagatgcctatttattttgataaactacctccattcctaaaaaaaaaaaaaaaaaagcaagatctgacttacattttgctaggatttccttgacttgtgagcgtctcagtcaagtaagagacagtgatggcttggatggcttgcagcagttggataacagagagagtgattaaaaaaaagaagaagaagaaaaaagaaaaaaagaaaagatgggatccaaggtttattttgaaggcaaatccaacaggatttcctaagactaagtggtcttagcaaaaagacaggagctagtaatgtcctagcctgggctctcatgaaggcaaattaagcatgagaattctggcacaatctgagaattcttgtggagattgattccgcggaatagtggcatgtagaaatgaagacgtcagtcagggtaggggtgttagcaactggtgtgcttgcccgtatctcaggaggtcacacagaactcaggtgctaagcatctcaggactctggcagcaggaaagggggggggggaggaaacgcatatccccaggttcttgtccctgggagatcgggtgcaggatactgactctgccaatcttccaggtttcttgatcacagagagtgagctatctgctgggctattcaattcttcagtgtttacatgctaaaaattgttataatgcttatctctgataaattattatttcaagttgactctcattttaatagtttttgggttggtttggattttggtttttgttcgttggtttggtttggtttggtttggtttggtttggtttggtttggtttgtttgagacaaggtatctctgtgtagccaaacttgctgtagaccagactagtcttgaactcacagatatccacctgcctctgctgggataaaagatatgtgttacctctgctcagcaacagttgtgtgtgtgtgtaggtgtacatatgtgtgtgcacacatggaggaagcaagaggtcaatacaggtgtcttctttagttggcatttatctttttagatagagacttattgaagcttggctcaccagttcaattcagctggcctgactggacagcaagttccagtaacagcctgtctccacctccccacaaattggatcacagctgtatgctccacgctgaggtttttgtgtctgtgctgggcacatgtgtcatgtttgcaccacaaactttactaacccttgactgactaaaccatcaccccagcccccattttaataatttttaactacagcaagaactaaatgtccttttctttactttcttaagaactcaccaccagcctgtttcctttgttcaatgatgtgtgctgcgtctgtgccctccagacccacagtgtgttttcgtaaacacatacaccttactttttactcagaggttatataaggctggtgtttgactctaagttagacttttccattaagacctggaaatatcgtctttcttcccttttatatcatcaccaagtcagaactcaagcacagacctgctgacaggaattcaaggcttttttcactctagatctatcttcctaaataggacttgttctgtaaccatatgcttggcccagggagtggcactattaagaggtgtggccttcctgggcactgccatgcttcttgccataatgataatggactgaacttctgaacctgtaagccagcaccacataaagcattccacctctttctaaatccaaagtccccaaatccatattcctccaaacaaaacaggatcaagcctataacagcaatatcccacttctgataccaacttctgtcttaattagggtttccatgctgtgaagagacaccttgactgaggcaactcttataaaggaaagcatttaattgggactggcttactggtactgatgttcagtccatgatcatcatatcgagaagcatgacagcatgcaagcaggcatggtgctgaaggagctgagagttcaacatgttgtcccaaaggcagctaggagaaaggtctcaaagcccattccccacagtggcatacttcttccaacaaggccacaactcctaatagtgccactccctgggccaaacattcaaaccaacactacttttattgttttcttttcctacaacccttctcccttcccacccctcaatactaggaaggcaggaaaggttagaggcaaaagggggagtagatctctttagactacttcctgttgagtagagtcatcaagttccatggggcaagccctgccttcatcatcaggatatctccaaccagcaaccagcaaccataaaaaatatctagcagcagccaacaggaccagcagtagcagagggagcaacagccactgtttgttcgttctctctctctctctctctctctctctctctctctctctctctctctcaatttaaaccctctgaagactcaacagaattctaaacataaactaccttcagctggcaaaaagtcacacccctaccagagcacaagacaaatcatagtcagctgctgtgggcagtctgaagcagccccatattccacaccggggaataaaacaaaaaaaaaaaaacatattcacataatataagtggagttttttgaaaagcccaaattctcactacattattccctccctctttctccccctcttctctctctttccctcccctctcctcaccagctcttccttctgctctcagctgtaacatttgctccacagtcactctgatttgctaagtaacagcacttgttacattcacaatattgtctgaccatcacctccatctagtttcaaatattttcctctgggccatgaaagaagaacttatactaattaaacgggccttcagcattccttccctgcccctctcagcccttggcaactgctaatcagcagccttctctgtggttttacctctccaggacttttgttataaatagatgctgaggatgtgccctcttgcgtctcgcttctttcactgaggacatcatcacattatagggatagggatgtgagcgattacataagggaccccaaggagaagcgaatgtaaacaggccaatctgactacattactttccagactttttgtcataccagcatagagagcaccccccccccagtctatgtctcagtatcttaccttagatataaaaatacagacattgaaatattcacctctattttcagacacttaagcaccaaactcctttccaatattaaaacagtcttgagtgcccaactggtgaaagacattatttttagccacttggctgaagaattgtgtaaatgtgttgcttctgggcttcttggcaatgttaggcaaggagatggtgtaagaggaacacaaatgccatggtctgtaactctttaacgagtcagtattcatgcaaaaggccgttttctgttatagagaaatcgagaagcaagtgctgtcccacgttcttcttttttttttttttttgtttttttgtttttgcttattttcttggatattttccttatttacatttcaaatgttttcccctttccaggtatccccttcagaaacccccttatcccatccccccctccccctgcctctctgagggtgctctcccaccctcctccctggcattcccctacactagggcatcgaacaccctcaggcccgagggtcggtatcacacttctactggggttttctataatagtttggcttctacacctcattttatatctctattaaatgtttagacactattccaagaaagaaatgttgctaaggacataattttatttattgctttttatatttatttattttatgtgtatgtgtgtattactcatgtgtatatctatggcactatgcatatgtttggtgtgcacagaggtcagcagaggccattgggtcccctggaactggagtgatgggtgattgtggaccaccttgaggttgttgggaattgaacctgagacctctggaagaacaagtacactgacccaactctctgccccactctcaagggatttttataaatttaaacgagagaaacatattgctcctcttttttgtctttttttgttgtattttgatttagcatttgagacaagatcttactgcattcccctcgccaggcacaaactcatgtgaatcaagctagtcttgaactcagagatcttcctgcttctgcttccctagtgcttggatcaaagatgttcgacagcactcctagtctttatcagtgcttctatctccaatgtttcacacacacacacacacacacacacacacacacacacacacacacaccttcgttcttaaaggaagaaggcataggatcaaattctcaactcctataggtttcttggttacttacttcacaggctaaactcagtagggaagacctgtgagacctgccatacccttccatcacatggttataatgaacgcaacactagtagcaaccatccctcatatcactgcttaggtaggaaatgtcccacagactcatgtgttgacttgctggcccctggacggtggtatgattttgacactttgggaaacacaagtagctcctactggagcatgtaagtcattggaggtgtgtccttggagaacgtattcccttcctgtattttttttttctgctttctgttcaccaggagctaaaaatttcccctccatgttgtatacaccatctgccatgatgttctttctgcccaagttgataggaccaagcaaccccacactgcaccctctgtaaacataagccaaaataaacctttcctctcagaccttctctcgggccattttgtctgatgaagagcaacttcatccccagatggtaatgcaagcttggaacattctggaaactttagggagcagagcctacctgcagaaaggcactggagcactggttctcaacccttctaaggctaagatcctttagccacagttcctcatgttgtggtgacagccctccccaaccataagattattttgttgctacttcataactataattttgctgctggtatgaattgtaatgtaaatatctgctatgcagccccaaagaggtcacaacccacaggttgagaaccactacgctggaggcatgtttctgaaggttatactagttcctgccctgttcctctctctttgcttcctttctgacaggaggacagtctccttttccacaggatgttgctgctataatatttattctgcttcagcatgaacccagaatcagcagagtcaataaccatgggcagaaatctctgaacccaccaaccaaagtatggccttcctccattagatactttccattcgatattttgtcatacccctgagataagaaactggatagcctataatgtgccttggtcaaccattatagaaacagtggtacaggttagctgttatcgcagacagtgccaggtctgagagattgtgccatccagcctcatgtaactttcattgtgaatattacaccaatttgtagaggttaagcctccatgcagagaccattcagtatctgcctggcatcagggctaggccactttattaagaaagcatttgtccgcctcaacaaaagaagccatataaagatttacaagaatgagtttcccctttcaaagataatcatccctgagagttgtcatccacaggggacagtaattgaaattctcatttgcaggtctcagccctaatagagcccataaatctgtaagaatttatctgctctgtgtcagcgtttggctaacaagcctgtcagtgtttccagatcctccagatgcccgtgtttaatgcttggctggtcttcttatgtagcataaccaaataggcatttcacaaccactctcgacccctgcaatctaaaacaacacagccagaagctctgaaatgtgttccgtgaagcatgaaagaactcattaaggctctgtcagtttcagtcctgtgcaacaacacagggtctgatgttcttatgaggattcctcttggcaccttagagagaatctgggtctcaggatcaaaagcaaacagggtagcttggagaggctatgacaaggttttccttttatattatatctgacaccttcattctaacagcagcaaaatggagaaggaacggtattacacataaacctgcgttgcctagacgtcatgatgacaaccagaggttttccacctaatagcaaaagttattctatgaatatttaaaagtattaccagtgaagtggttagagccagtttgctctttccaattagaagttaggggcacatgtggtgttatttcaaggctggcagttatgagcccttgagtgctcatgacctagtggccggactggcagacccaaagactttatactgaaaactccaaaagctaggagctgaacacggtaggcttaaaaacgtaaaaggcactcaagctgaaggcttatctctctgggccttgactaacaacatgctcccccacatactcaatgctaccaccatatacacggttagcagctagcctgatccttggttccacagagagctacagttgtaaacagcggctagcaggatcaggtaggtaccacttacttgtgttctggtcttaaacaggcttcaggcactaggaccttcagccctagagtgttagccctttagactagttagtgtttcagttctcaggccaaggatgtctgagactcttggttcttcagggttgtagctcacttaatctctttcagtgactaaaggccttttcctgtagcctcagatttctctctgctttctttctatatctatctctcttgtagctgctgctgctcctgccgccgccttctggctgttgctgctcttccaactgctcttagaacatcatctgcccatccttactattgttgctactgtcatccttagggtcagagcctgagccttggcaactctgacaagccaagctcacctacccactcaaaatattccaactgaactggcaactaacagtgaagagcaaagaaaagagatttattcagtgcaaccacagaagaagaagaagaagaagaagaagaagaagaagaagaagaagaagaagaagaagaagaagaagaagaagaagaagaagaagaaaagaagaagaagaagaagaaaagaagaagaagaagaagaagaagaagaagaagaagaagaagaagaagaagaagaagaaaggagaaggagagagagagagagacagagagagagagacatagagagaacgagagagagaaagagaaagagaaagagaaagagaaagagaaagagaaagaaaagagaaagagaaaaaagaagtctgtgacctcccaagttcatctttggtgtcctaacatggggtttaggcttaactagatagcaagaggtgggttggagagatggctctgtgattgacactggctgcacttccaaggatgagggttcaattcccagcacccatatgaaggctcatgaaagtatgtgactccagttccaagggatccgatgccttcttctggcctttgttggcacaacacacacatgcaggcaaaatactcatacacatacaaatatttaggaaggaaggagggagagaggaagagcaagagggggggaatggagaaaggaaggaaagaaggaaggaaggaagaaaggaaggaaggaaggaaggaaggaaggaaggaaggaaggaaggaaggaaggaaggaaggaaggaaggaaggaagggactatagctggtagagcagtactggccaatatgtgagcctgtctatcactgactcctcattatcatctcctctgtctcctgcaaggccttctgacaaggtgttagagctgtgttaaaatctttttcttggcagacttttatcctctcactggttttagccttttccttttcagcatgcgatccctgggaaaattccaactccttggggatcattgtttcaacggtctgattgcctaaaggaggggcacaagtgtctcttaaatctccactcctgccaacatgtttacatgaccaccgtggccactgccactaacccactgagtcttctacagcccccagtgctatcaggtcatcctgctttactaatgctaaagaccaaaagtcattctaggacagcctttattgtgtctaatgttgcaacaccagggggcagtacagaaagggcgtctcttagctgacccatacattacactcaacagcctgcttctgaagccagaatcgagtgtgccaacgacaggagataaacatgttcacggaggactgtgtctcagtcacagcacagtcccacatgcaaaggaagtagtgtgtttgcagaaattgaggtcttttgctgggccagtcggggaagcacccttcctccttggcttgggtgaaaagagtgacagagttgtgtgtattgacccaaaagactggcccaagatgcttgaaacagccacagttgcaatgtagcttcctcaggttgtccacaaagttttcataccaactgggtcagtatgacagaaggcagtcctcttggctgtgggtccatagttcttcaattcaagtcatcagggacacgggtgagggaatggcctcacagctgtcaatcatcccagcctccgacatcataacttatttaaaggaaaagacacatttaagagggccctaacaataaaggcttattataaacagtgtcttatctatatttaacagttctctaacaatgtttaatgtttgcctcattgccccagggagtagtaggtggtgcctataatctatctcaaaagggtattgacatacagtttgaatagcaatggagattttacattcagagagttttaatcagtcacaagccttttatcaaaacatttaaccatgctgtggcttgcctttggtatctgttaaatgaaaactgtaaagtggttcaggccttcaaagaagtggtaggaaagcctcttcaagagtcaacatgcgtcttactcagcaaaaacgggaagtcctgatttgataaatattttggttgtttcctggccgactaaaaaagtaacccaaacagctagctttgttaaagatggacttggagggaaacatacaataaaaaatgaaaaacaaaaagaaaaactgaatactaaacccccaagttcatcgcttcctcctccaccctcggaacgcatggctgccatttccactcttccttgcccctccccgtctcgtgctcataaggaatgctttgcccttgttttcctggagattttcttcccattcaccccttacatcgtgcgatccggctcttgcccccattactcaattgaagaacttcttgctaaagttactgcaacatttgttgcaaaacccaaaggacgtttttttaggctcttttccagtttgaatgtttggtggctttctccggcttatggcttgccctggtctcatccacgccatacctcttgaccccctggtacatcagtggaggctgctgatgtacgatgcagaaacgtattgagctgcttcagtgtgccaactgcgagcactgcacaacatgaagaacacttgcagctatacatatgtcaactccagtaggatgttcatcctcatgaccaccacactccaacccttgctacagagatctaattctttgtatacatttgaggaagattgcccaggatgcaaatggacttttctttcctaggggaatcttagaagagagtggttggggggaaaacacacacgcgcacacacacacacacacacacgcctctaacctgctgctgcaaaattagtagtttcacgtcttccccaaagctcattctaaatatcacccagtttccacctttcctggcaatgaaaacagctagtcacatggtcaaggcactcattgccaaagttctgcagctaaaattaacatacgctaattaagccgagaccgctgcatttgtctgtttgtagtgaggtacagtggtgtgccaagtggatcttctgagctgctgcaatagaataacagcagcctgttgcttcttccttagagtctataatttccccataagaagttaactactgtaatcttctctgtagatgactggagtgcccagatcatggtagactttgtaattccatgcagagtgtggaatgataggaatagaaagatcagagtcctccactgcactattggctagaacagtgaaatggaagaatggagagatggccctttgattcctagattcatattctttctaatgggaaaacaacacctgcgggagaggctgagagtcagtgggtagcccacccaatggcatcccaacacagaacactataacccacgaatagacacttccattttacttctgaacttctgcgttgtgtgagacttgctagaagcagagaagagagattgacggcggcaggacgactcctttatatctgagtactgctgacactcggctgctgtgcttaggatcccctacgactgtggatcagattcagaaacctccccagacactgatgctctgtgagggtctatgggaaagagaagcaaccagttgcccagaataaaggtttacaccacggtggcaaaacactgtctcttctaggaaaagactgtggtctgcttaggggaactgtgacacggatctctgtggctgacttgacacctttaactgggagagcatgctgttggcacctttgctgcctctgcggctgacactctgtcaatgaattcgtccggttagctctgctggtgagaaagattggcaaacgccagcttgccgagtcacccttcgttggttgttcagtgatttttttctatagtggctgtcggataatatatgatgcaaagtgaatggagagatggctgctcttccagaggacccaagtccaatccccatagctgatatgactctctcagaacctgcataaaggtagaagaaaagaaccagtaccccccacaaagttgttagttgttacaagctccctaccacctagaactctagcgccagagaacctgacaccctcttctggcctctggggatgggtacacacacgacatacacatactcaaacacacatacacacacatacaggaagaaggggaaaaaaaccgtagacctcaaagtacaatttttgctggatgctgttggtttcacactctcttaaagtcaaaaactgttaagtgttgccatctatacttttttaacacatcgctccagaaggtaagcaataactttagtgccttcatgaaagtccctttatggctctcctgggccccaaagtaccagcttttccttgttattgagttctttcttcttgtgtgttttcccaagtgtcctctatcctccaagcagtggcacgctcttagtccttctaataatgacactcagtctcttcttcagtcaagcagtttgcagttcacaatgtcctcatctgtaagtttcctttaaatcaagcagagcaatcctaaccttcccaagtgccatttccaagacaacactggttgcacagaaagcaatttgctgtagcactttggctcttgcttgctgtctgtgtttatgattgctggttgtcctgttgttgttgggttgtttttttgtttgtttgtttgttttgtttttgtttttgtttttcctgataagccttgaatactgcttgttcttctatacaggcacttgaaaaatggctctgttttcttctattagttacgttttaacactgcttcaagccttatgtggtatcccacaccttttcgaaatacaaaagtaaagtataattgcaacccacacttttaatttgacaagacagttcgcttgtgagtcctccaacaggtctctgagctctgggagctctctgttgccccctgctgggaagtgacggactagcgtttggattattactggggaagcattgttactagaccttactggaaccccacaggttctcccttccaccctcactcgcctctcactgaaactgtttcttcatcttctagtcatttatcgtctgtgtttagaatgacttcagaagatcccataattctagcaaaacctgtgattatgtagatagttgggttttttggtggtggtgggttattctgatttatttgggaggggtgtgtgtgtgtgtgtgtgtgtgtgtgtgtgtgtgtgtatccctgtctctctgtctctgtctttttgtctgtctgtctgtctttttgtctgtctgtctgtgttctgggttattcctgttatttggaaatactgctcttgtcctggagagatggctcagcgactaagagcaccaaccgctcttccagagggcctgagatccattcccagcaaccagactgtgaaaatactgctcttctcactcatttacccacgcggcaattattataaggactagaaattatttcagaagttatctgttctaaagcttttttaattttgtctttctattaagatttttcgggagaatttatttgaaaggatgccagaacattctcatcttgtatatctgagatatgtcaaaaatctgggggctggagaatcagcccagagttaactgtgcatactactttgacagaggacaaaaattcaattcccagacctctgctgagcagataacaactgcctgttactccagttccaaggaatccaacatctcttgtctcctgcactcatgtgaaataccacacctctgtccattgaccgcatggaaacccatgccctggctagcccccaaggaaggaatttactatccttatattttatcactgtctcctagtgatcaaagctacatccctggttacctgggttccatcctctggctcttcactggctccttagaaggacagtgtccatgctctgtgggatcacttttattagactctgaagaggaggaggctgcagatagaacatgtctgataaagcctcctaaagttaagcctgtttctacatttgttacccaagattgatccttgtcaaagtgtggcagagttgattttggcaacataagttgagtggcatctgttttaagggacaagactgaggggactagagatgtctcagcaattaaaaagtgcttggggctcttgaagaagacccggattctttttctcgtacctataattgtctttagctctactttcagaggatccaatgccctcttctcaaccctatgggcaccaaacacacacggttcacagacatacatgcaggcaaaacacccatacacaaaaaataaaggcaaataaatctttctaaaacacaaattagagggggatattgtttaaaggtactacacaagtaaatagtgaaatttatgaatgatattaaaatgcagaccgaatagtttctagatttttctctcttgaataatttgcaagtccatatatggttttcaaaactcaccaagttctggtgcttcaaattcatattatatcttgagtccaactaatgggtctcaaccttcctaattctgagaccgtttaatacagtttctcgtgttgtggtgaccaccaaccataaaattattttccttgctacttcataactataactttgcaactgttacagatcataaagtgttttctgatggtcttaggctacccttgtgaaggggtcatttgaatcccaaaagggtcactacacacaggctgagaaacactattctacaaagaaatagatagagagatagttagatagatatatagatagatagatagatagatagatagattctcacttctcaataaaatacaaacaagtccatccttttatctttccagtagtttaaaaatagttttactgaccttttttttttttgacaattccataatgcatatagcacacactgcttactgtaacccctgcatctctctgccacctcctaatccatctttttagcctgtaactctctaccctcttatgcaactcacactcttagtgaaagttactcaccagtgcacactcaagagagggggagcattccccttccccaggcaagaagctttccctactcagagagcagacttgagaactcgtgtaacacttcaagacaccctgaatatttttcttaaaaaaaaaaaaaatcacagtccagacgttcaataaccaggtctgggtccatttagaaagaggaagaaaagaaacaaattttgtcggtggagaacaaaacttgaagataattaatagtgacagatgaagagattatgcttcattttatcgttaacactgccactcttcccggattttattgcagatcctagcgaggagaggggaaaagaaaagtctagggattaaggataaactttagcgtgaggggggcattaaaaagccaagtttagagcagagcaagggcaactaaaggataatgtgactgccagagggcgtgttagccaatgatgacaaatgagctcacaaaggttcgtttgacagtctgcaaactgacaggagtgcctgtagacaggtagcagatggcacatggtatgggacctgctctaagtgaactgacaccaagaagaccgcaaggctacatcccacagcgacagcatggttacagcccacagctctaacttgtgacccagtccacaagtccgtaagggcacaatatgtcaacatgtggaatcctgggacttggggggaaataaatgtgggaccataacaaaatagcacaatagcctaagagccaaattcatgttctggtgtcaaagcacgttcatggagtgtttttataataacggagaggagggaaaggtcatgaaacaaggcgcttttcagataacctttgtggaaaccgaagtggctacagcaaagtggaaaaatcctatgagctttccgtgttggctgatgactcgtagtttcttggttggcagaacctatggttttgttaatgtatcccaaaaggtttgtatctactggttacaggatgctagggtctgcccagtaggcaaggaatggctatttagtgggtgtggtggttggaatgagaatgtccgtcacaggctctgatatttgaatacttggcccctcggtggtggaactgtttgaggaggggtagaaagtatggctttcctggaagacgtctatcagtgggaacatggtgtgaggcttccaagccatgagccattttcggttctttcccctgcttgctccttatgatgggagctctcattggaatgccccagctgccaggcttgcctgcagctgaacctcccccacggtaatggcgacagactcttcttactcctctggaaccatacccccagataaaccttaccttctacaggttgccttgattatgctgtcttatcacagtaacagaaaagtaactgttacaggggctaaggctatccctacataaattgcaattaggctgcactattcacaactcgccacagacactggggtgagaaccagttcacccacctcgcaaacatttccaacctgaaggtgcagcctcattcactctgggagctgctgctctgccttctctctgctctccaaaggatgtcatcgcatccataccacacagccagataactgggacccttctcgctcgggctaagcagtctatatataaatcagacattatccatttccatttccctgtgtaggatgttctgcagagaaagtaacatgatttcctggaatgtctatgtgctttgtgcaagtcttaaaaggaaacgatcccaaaactcagttccttgttggttctgcttgatttgatctaaattctttatttaaaaaatagagaattctattctagtctattctcctttaatatccatcagttaaaaaaaaaatactttttgtgcccttataaataacctacattctatgcaagaagttatagtgttctgttaaaaggatcgaattaaataaagacatcagcagaaattgaatcaacaattcttgttcctgtctgtgaaatgtcaattaaatcccaaggccccaacaacaaacccagaagccttatttgagcattctgatagcctttgctttaccaataagccacctctttcctctgagatttgaatcacttttaaatgaattattgggctacatgatgacctagactcccaggatttatcactgttaattttctacctctctctgaccatatcttgttaatttggagagcatcccgcagagctttgctctgccaaatgaagccttcaactaaccagcagagggagccccagaagacgcctcagctcccccagtgtcttcctgggtgcaccaggaagtctctgtgaattcaggtctgctctctgcaggaagaagtgctgttcaagttggaggtagaaaagaccgatcttttagatggtggtttattgacttatttagtgctttgcttaaggcactctttgtgctgcctattcgccaagcgtgatttcagataactggagctgaatgacccagagaaagagcagaaacaatggacagtctgctgacctaaccatgcttgcttgcctgccccaccttgtggtttttatacattaagaatacacagtagacacaggctcaaggccttcatgagctttgctggcttcggtccaccgatgacggctcctctcctccgctctcactgtttgttgtccgggtgctcatccagaaagagccccacaagagacttactggggaaagcctgggttctgtctgcacaccagtaggaaactagtctctcgcctaagatcttttgagaacggaaagtctctttcgtacaaatttctcttaacagctcagtggctcttgtttttcgaaaccctaaataaattgattctatggatccatggatggttaatgagatggggagaaaaagaaaataagctctctccaaaactgtttaagacaacactggtttgtggagtgtcgaattattaaattacccagtttgtttcttccactgtaaagatgcagtagtgatagtaatcctggctcctgcctcagtcactaatctctctccccccatcccctccccctccccctctccttccccttcccctgtctttcttgctcacttgctccctggcttgctcttgctttcttactctctctgtgcatttgtgtgtgtgtgtatgcatgtgtgtttttatgtgtgcatgcttctgtgtgggtgtcttttgtgtctgtgtgtgtatgtgtctgtgtccgtgtatgtatgtgtgagtatatgtatgtatgtgtattatgtacatgtgtgtatgtatgtgtgtctgtgtgtgtatgtatgtgtatgtgtgtttatgtgtgtggtgtagttaatcctcacatcagcccttactggtaggtttcattgttcccacctacagaggaagaaatagagggcttggtgaagaattcaatcaaggacacaagctagagagaactttctgactcaaaagccggttctcaccggttaagaaaaataaccccatcttgtaggtattttgaactgtacatgtcatttaaccgttactgtccccacttccaaaggtcctgtgaggtaagcacgaatagtaacttccccttctcccaactcctttttacctctttagctcctaattttaaaagttagcttgggactgaaaagatcgcttagtgtttaggggcattcgctgctcttgctgagggcctaggtgcagtttctggaacccacacgtggtttacagccatctggaaccgataccttcttctcacctctgaggtcatcagacatgcacagagtacgcagacacacatgcaggtaaacactcctacacatagcatttttttaaaaatccttttattaaagatgagagaaactaaagctcacaacatcaaatgaggttttctctttctgtatagagtagagctgagactggggtggggaggggcgatgtgattggcagagtctgctttgtcacctataggtgatgggactcatctttctccccaacgccttaatcccaacacagccatttaagccctgagttgttttggttttttgtttgtttgtttgtttgtttgtttgttgttttgctttgtttttaagaaatgagaacagctaccggaagatccaacaatacctctcctgggcatatacccagaagatgttccaactggtaataaggacacatgttccactatgttcatagcagccttatttataatagccagaagctggaaagaacccagatttccctcaacaaaggaatggatactgaaagtgtgatacatttacacaatgaagtactactcagctattaaaaagaatgaatttatgaaattcttgggcaaatgcatgtatctggaggatatcatccttagtgaggtaacccaatcacaaaagaagtcacttgatatgcactcactgataagtggatattagcccagaaacttagaatacccaagatacaatttgcaaagcacaagaaaatcaagaagaacgaagaccaaagtgtggatacttcattcctccttaggctagggaacaaaacacccatggaaggagttacagagacaaagtttagagctaagacgaaaggatgcaccatccagatactagcccacccagggatccatcccataatcagccaccaaacccagacactattgcatatgccagcaagattttgctgaaaggaccctgatatagctatctcaagtgagactatgccagtgtctggcaaacacagaagtggatgcacacagtcatctataggatagaacacagggcccccaatataggagctagagaaagtacccaaggagctaaaggggtctgtaaccctataggtggaacaacaatatgaactaaccagtacctccagagctcatgtctctagctgcatatgtatcagaagatggcctagtcggccatcattgggaagagaggccccttgatcttacaaactttataagccccagtacaggggatgccagggccaagaagtaggagtgagtgggtaggggagcagggcgggggtatagggaactttcgggatagcatttgaaatgtaaataaagaaaatatctaataaaaagaaaaaaggaaagaaatgagaacagcattatgttatttccaaagatcaaatgaaataaggtgtgaaggtgtttattaggtaggtaaacaatatacagacccatacaatcccattatcaatatgatcttgggttagagtcgggagccaagttatgtgtatcttatggcaaaatggcaagagaaagcaggtctgtgtcttttatttgcttcttccagtgagtgttcagtgttcagcctctcctctccataccccagttaactgcctttcccgctctctttgtcttgactctcagggagcaatgttgcttggaaagcattagaaggcatttagaggtcatatccatccttcttaaactttgatgcatctgtttgtctggactgtcctatgagatgctatccatctacctgggaagccttccacccctcattctgccctctctgacacttggaatccatcttcttgtcctttagagtgaaagcagctgtcatcactgacagtcctcagcgtctatggggctgtaccaacccatcctctgcaaatcaaaaacatcacagtgaaaaacgccctttgtgaacctcccactcttcacgtagcccagtgactctgtgctgctggattccaggcactgccccgtcatggttggatgagagctattgtcttattattcagaatcatgaaaaagaataatcagagtgttcactagcctggaaaaagttttaaagtacactttctacattttctatcataaaaataaaaaattataggtccaagaaccagtaagtcaaagacaacgtggacatcattataaactgccctggtatccatttgttacgcataaaactaagaaattgtcagggtgggactagagagatggctcagcagttaagagcacgtgggctgctcttccagaggatccagattcaattcccagcaaccacatggcagcttacaactgtctgtaactccagttccaagggatctgacaccctcacatagaaaatcaatcaatcaatcaatcaatcaatcaatcaatcttttttttttaaacctaaggaattgtgaagcagcttaaaatggagagatgggacctggcctttgccctgacctctgcagcttaaaacaaccaggaggctgcttttattctcctgggagtctgtttctcaaatgtgtgtgcatgtgcactgtgacgtggagatgtgaagggcactgagtggagagcactgtgggagcaggtgctctggacttgctagatctatatgttggattcagtgtcatttgagtactaccattgcagaggcaccagctgaacaagacaaattggtcattcatcacgagttccttaaatatgcattctggacagcagctactggtgaaataattcaagttggtgggtgtcataaggtgaaaaaggacattctagatagccaatattgatgcaagaattacaggtttggtgggtactggaaaagttaaaaaatgagcttccagtgactcaaagttaatgagtgtagtaacgtctttttttaaataataaagcacaaattggttttggaaagaaaaatgtaacaaatgagagactcattgttttaacctcagagaccactaaacaaccaaaccaaacaaaccccaaaaagttcatgcaatagcatcagaggagaaccaaagggtgggttctacaaggataatgaattctgctgacatttcctcttcttggctataagaatttttgcatcttttgcaatcataccctgttggaaagcctcgtggcttgggttgatttatacctactacatattttgatttccaaaagtgcatgtccatgagtaagtaaataggcagtctcaggatgaccgtcttcatcaaaaacacatatgcattggctgcataattgtttaaacaactggcatcctagcatcaacaagaattttcttctggtacccacattggaggatattgcatgacttgggagaaaagacaggtataggctaattcttggggactctcagagtactggaagaggaattcattaaccccttccttagtataagaatctctgaacaccactgaaaagcattcttcctttgaatgcttgtagtgaagagtttactcctttgaagagttctgtttttatgttttccaagaaagaaagagagaggggggagggaggaagggagggaggaaggaaggaaggaaggaaggaaggaaggaaggaaggaaggaagaaaggaaggaaggaagagaaacatcttgtgagggtggagccacacgtgtgcaattaggtacatatgtgaaagtccacaggcatcctccagtgtccttgccttctcccctactgagacaagatctctttgttctttactgctctgaaaggtagtgtgtcaggcttttcagcttcggagtattctcctgtctctgcctcccatctccttgtataagtgctgggattacagccccatgctactgtgcccatctttaaacggattctggggatcccacctcaagtcctcatgcttacagtgataagccactttaccgtttaacccactgagccatctccccagctcctcctatgcttccatacagtagagaaaatgtataagtattggtgttagatgattctatgagagccacatagtccaaatcagatggaatcagacttcttaatgattttgctcctccctgccactaacaagtccccacttttaggctactcattgcatttcccccacaattctttgtaacatgactttctggattacagccagtgcagatgtaggagatagaagaggtgaaagagatcgaagtgtttgtttctgttatctaatgtaacagaaatgttctttctctcagtcttgtgacattgatcatgcaagttgtctggcctcttcatgaatgttgccacatgaagtggctccacatttctttctcattgggtctaacaaattataaaattatgtagttcttaaattaagtctggttttcgagatgctgccgtgatgttgaataactgagataaattattcttttcatttctcatatagcatcaatttagtaatgctggcaaaagatatacacagaaaattcccaacctacaggtttgtgttctagatgctggttactgacaatacattttacacagatattacatttttagacccgcttaccaaaatgtgtcaactcctggaatgcctgattgtgacagaaatcagacacaaagcaaaacatgacctcaggtttctgctttgttttagttttagttaacctgaaccctgcacataactagacctagcactctaacagtgttttgttttgttttctggattaatatgaccgagccccactcgagagggccccagttgcttgccctcctctattcagctgggttaaagatgccctggctgtgtgctctggagaaaaattgccttacaacctgagtgagcccagtgagggtgggaagaggagcactgcagcagatagatgctctagattgtctatgcgagagtagcatgaggtcgacaagatggctcaatagatcaacatgcttgtccccaaacctgataaagctgtgtgattaattccttggccccaagtggtagacaacaagaattcatcccataagtttttctctgaactacacacacacacatgttcccaagatttgcacatgcatacacgtgcacattctcacacaaataaaatatgtaaataaatataaatttgagaaaagcatatcaatagctgctcgtctaggtcttcattggttccgtttagagttataatcttgccttcgtaacagtattgggcgggctctctctctctctctctctctctctctctctctctctcgtgtctttctttctatgttttcttagatagggtcttattaagtagccctggctggcctggaactaaactgacctctaacccacagagatccacctctctctgcctcctgatccctgagattaaaggtacaatgtgtgcccttttcttctacattggcccaagtcacagccttacccaagctctttcacctttcaccccgtttccttaaagtcacaatgacatcctccagttttacatcacttgtcctgtaggcactctgtatggcttatacataaatatatttatgtgttgaaccctcctaagatagaaaacatccatttcttgtcgttctgtgtctggctcgttttgcttcaattcgtacatttgctctcctgcatctgttgctcttccactcttcttctcaggagaataaaatctgttgaatgtttgcatcacattttctcaatccattcatctgttaagtgatatctaggttgattccaaaccttggctacttgactagagcaacagtgctcatgaccattatctaaggtccatagagtgccttcgcacagaggcagacgaaataaataaataaataaataaataaataaataaatggcaatattaactttgagataatgagaatttttgcttccatggttatcaaggaaattggtgtgcacttttccattttaactttgatctgtccttacctggattttaatatgtgggtaaaactggccatgcagactgagtttgggtattcctttcctttcctttcctttcctttcctttcctttcctttcctttcctttcctttcctttcctttcctttcctttccattttgtgggacaggtgcaggagaaatgatgttggctgctccttgaaggctcagtggaacttagcagtgaatccttttggtcttaggcttttatttgtcaggaggcttcttattccttcttatatcttatccttatatcttattccttcttatatcttcttaatttacttttaaaaggaatttgtcaatctcttctagttatcctatttgagaaacacgtttgtttcactgcaatttatttaataccctgcctttcatctccaattttattaatttgaatttttttctctctttttgggtagtttgacccgtggcttatcattgttgtcttcttttctttctgtctttctttcaatgaactaactcttgggtatattatctttaagtctccattttattgttttctgccttgattttttttttcctggacatctgctgcttttagatttgacgtattcttgattttctcagactttgaggtatatcattaggttctttgaactctctctctctctcttaatgtaaatactcatagctatacactttaactatagcttcagctataactttaaccttaagccgtaaactttaaaactgccttagctgttcccaagggttctgagaatttctgttattattttcattttagtctaagaatttatacaaattcttttctggtttcttttagtgacccccatcgtcattcaagagtgttttgctcacaaaacactcattctgattctttttcaccaggctgtgtggaggtgggttctagtccgccatctcacccagaagtccaaaaatgaagcaattttatgtaaagtacttagaataaagccaagtacataggaaaaactgcagtttagtactatcatccttagtccttattgtcccatagttttccccgcctggagagggtagtggtggggacacagagtaggactctggtgtggctttaaagtctgagggcttccagatgttctagctctctaactgtactgaagtgctgatgataacttaaaaatcctaaaacctttcttactctttctaagggtaaaaggctgctggtttaggggattaacacctgtagcctaacaaaggaaacttaagcaatgtggcttttgttctatctcagcaggaactgcttagctctaactttcagtctactagtctgaaagtagcaggaagaagaaaggactttgaaaagtgattatacttttctatacttttttattactaagttctaaaaagtttcctatgaaagctaactaaggggtaaagtggaaagaagatactatgcagggaagggggaaaattcttctaagtggggaaaaaggaaaaaaaaaacttctctaagccgggaaaggcgaaaaattctcctctttccttctcatctctatgttcttagtacttatacatctttcagaatacatggtcacatattaaagagttcatcacggggctggtgagatggctcagcaggtaagagcactgactgctcttctaaagatcctgagttcaaatcccagcaatcacatggtggctcacaaccacccacagtgagatctgacaccctcttctgctgtgtctgaagtcagctacaacgtacttatgtataataataaataaatctttggtcctgagtgggcagaggtgctaaaaattcaattccctacaaccacatgaaggctcacaaccatctgtatagctacagtgtactcacatatataagataaataatttttaaaaaaagttcatcacaagttcacacaaaatatcaaatcataaattgaaatagaagtttacaatagagaatgtttacatgcatatccattaggagtaattatctggctaaacatccatcacctgtctcagctccacaggttcactgaaggtttaaaaccctaactaagttattagtgaagttttgtatagataatcccagtcagtattttatcttctgtcctagcacctataatacatcattagttcccttttatgagttttagttaattgttttacaacctcttggaatgtgctctgagtaggagaaactctggttactacctaagagcaattaactggtgacacttgggagactggcagagttctcattgcagttttgactatcaaaaaaggacctaatagcggtcccactataaaagagcttaataatcactgacataattttgggaattcttataggctcatcattaacactgaagaagtcatctatttgcctatatagcatcactacaaatcagaacatcttcatagatgtgcagagatctgctcaaaaggggtgggctaatacctagttattgtttatatgtttaataacaatcggaaaagcatattaatagaggaatcattcctaagtgaatttccttaggcattgcctgataagactgaacttgttgcagattataatccaaagcagaccatctcaggaagatcccctgctagttattagcttgtcctattatggctcctgacatttctccactgtggagccttccaccagaggaaccatctcaccaaaacctgaaactgtgtttaaggcttataagagctgtgggtttgttatgaggagtttccccacaataaaatccccattcttgacttgatttccccatagtcaatcaatccaccatcagctgctttctctttgtgctttaaaggaaacaccatatattcccagttcttatttactgctctatgaaatggtaaatgtggtttaacaaccccagcacacaactgtgtcacaacttatttccagtgaagccctcaaaagagtaaatcaccagctataaactcactgtttactttgtatcctgtttaatatttctgtagcatatgtcagtgacacactcagttctcttccagcctaatctccatgtggggttttttttaatttcataattttctcattaaagactgaccaggaggaccacatcctttgtcccttttgcaagctactcaagtttcttagaaaacactcatccattttaacatgtcactgaccctgaactctctcttgtgcttcagcccacgttccccattgccttctggacattcctcctggaagactaacaggaatcttaaattcagtgtatctcaaccaaattacctaactcccaccaattcttttatagtggcagcaccaaacctaatcacagatttagtcaggtgtccatcaaatatgtgtcaagaatagccttttgatggcaatccatagtacaaagtatatttttccattatgcctcatgttagagacatattaatatgcatatgtcctactttacttttctaagggatggtcatgatagcctctgttggttttataatgtatcactgggttacaatttacagtgaccaatcacatacagaagttataggaagaagatagtttaagtttttttggttcaagttagtacatggtgactaagattaggaattaggaagtatacttgttgggcaaaaatgaaagcaggacattttgtttttaaccataattcaatgtaattcttggctggtccattttagatatacgcccaagagctgttagagtaatgtcatatggatagctctattttctgtttttggtttggtttggtttggttttttagtattctccatactgattttataggagttacacaaatttatattcataacatagtgaataaagtctcctctttccctaaaatttggctcgcatttgtttcttgatagtggtcattgtggtggggtagggattctcagagcagttctaatgtgtatttccctgatgcctaaagatgttaaatacctctccaaggatttactggccatttatatttgtcatttgaaaactaactcaattcaataacacatttattgattggatgattaattttggtgcttgttttgtggctccttgtgttattaatcacctgtctaatgtgtagttggtaaaaaaaaaaaagttattttttattctgtaggctagctcctctctggtgattgtttcctttgctgtgcttccaaatcttttttttttaagaacatgattttaatattttcaactgttaatgttcaacaaacagaatcattattctaccatatacttcattgttatgtctccattttcatttctgattttattaatttattaattggatactgtctctgtgccctctgggatgccgggatcctgtgatcctgtggtcctgggcatattagagcatccgggagtggaacttcctctgggtgttgtgggactgactgtagagttcacacccaaggtctgctcaaggcactagcccagaccggaaggcacttccaaatcttttgatgcttgttttccctttaagatatatttgaaatttaaactgcaaatctctatatacatatcttataggcacacattattataaattatactatatgtattttgtaaattatgaacacataaaacataaattcagagagtataagttttcaaaattatcagtataggctaatattttctatacctcaggctattgcttcagacactgtgttctggagactagctagaaagtgttatatttaacaggaaaaaaaaatgttttcttcttacactgaagtaccactgattggccatcagtactgtgttgtttgcatagtgcatcccagaggacgccactgaacataagctcttgtggtttcaaatggctcagtctggttaggagaaccaagctactaccacaaatagaatgtgactcctgtggccttgaaaccactgggttctgacaaatacagaagtggattctctcagccatccattggactgagcacagggtccccaatggaagagctggagaaagtacccaaggagctgaaggggtttgcagccacttaggaggaacaacaatatgaaccaacctgtactcccagagttcccagagactaagccaccaaccaaagaatacacatggtgggactcatggctctagctgcatatgtagcagaggatggcctagtcagtcatcaatgggaggagaggcccttggtcatgtgaaggctctatgccccagtataggggaatgccaggaccaggaagcaggagtgggtgggttggtgagcagggggaagggggatgagatagggggttttcagagaggaaacaaggaaagaggataacatttgaaatgtaaataaagaaaatatctaataaaaaaataaaaaagaaaaaggaaaggaaaaaagaaaaagaagtctttatttatgtggcctgtaatgagtgctaggactgaactaagaggtgacaagcatttctttaaaaacctttcttcttcgacagtttcacacatgtacgtagcgattgtgactctgcataacctccattgtcctctcccactcccctccctcgcttcccaacaagtctccttttactctcatgtcttctttgtgtgtgactcattgagtttgggattgacgcaagggtgggaaattattggctggattgtggctagattattaaaacggctacaccactgcagaaagtgatacctgctctcctagcaaccattgaccatcaagagttggccattggtaggaggtgtttctgtgatggaggaatgttgatgggctcagtcctgtgtagtctttacaggtaaccacagcctcagtgatgtcaaaggccatgtcacatctcgaagatgtctctttggcagcatgcctcctcatccactggctcttacattctttctgtcacttcttctgtttcctgagccttggggctggtgatacagagtggggcactcccctgagaaggcattagctctaaataatctgacctctctctgaaaagagctatgcgcctagcccaagattttaatggtaacagatactttgattaaattgcttttgcctgtattagtgtcactgataccatactccccctgtgaagtaagtggggcatgttcattttacaaatgagcaaacgtttatagaagacaagtgctcacagataatcagaggcctaggcctttccagggcacttttaactcatgtgttatcatcttgtttaacctcattagatttcacttctttaagatgagggttttctttttagggtaaatttgatttaacagaaaaactggaaagttagcaaagacagttctcaaattttccatactctagattgtgttaataaattgccatagattgggaaccttgagcaatagatgctattttctcactgtgctggaagccaaaattccacgatcaaagtataggcagggatggtttcttctgacatttccccttttctttttgacttgtactgtttacgttggcgttgtgcttttgttataatcatcgacccaagttgatccaatattattgttaataatctttacttagattcctaaacgtttcacccagtaaccattatctgttataaaatgtcatctaaaatacaatattatgtttttctattactctggacttaatgcatccttgccaaattgacaagttaaaaaccccagtagaatatgatgatgtgaagctggaaagagtagagcatatactactcaaatctgcatttaattcctagtctctgggtttgattgctagcacccatgttgggtggctcacaattgcttataacttcagcttcaggggaatccaatgtctctggcctccaaggactctcatgcacatacccacacacattatatataaatgtgatggtatttgaagatggggcctttggttggtaattggtgttacacgaggccatcgaggtaagacctccataacgttcatacaagcataatgttcatacaagaagaagaaaaccaaacagaactgaactttctccactatgtgaggatggagtacagagattgcaagcaaagacatgaaccatatacaggaagcaaacattcttgtatctcgatgttgactctctaccctcccaacctatgagaaatatctataggttggttaattcattcatggttttggtgtttggttttggcagcttgcaaggacagattatctaagttcttcttgtctaacaacctcagacttttccagatttaatggcttccataattttaagaactactccaactaggataaaaatgtttgtaaaaaatgttccccaactaggatatatctactgttttctcatgattagactagagggcatagcagttgttgggggaagagcacagataatagaccattcttattacatcttctcaagattgcctgctttcagcttgccttttccctattgaggctggtctgtgttgcctggtcacagtgggagttgtcaaaattctccagtctcttctagaaagttggtctctcccctcactctatatactctttgacagaaagttattgtttagttttcaggaagggagggttctgaggtttcacatttattatctatagagcagaaggttggggtcagttttctaaattgcctctgattcttttccatgtagttggtgagaagtactttctctgttaaaaatgaaggctggattcacagagcagagagaacagcatccgagaggtttgagcctgtagctttaagcatcttagcagctgccctgggagacctacaaaactaagtgaggtcagaaatataatgggaaatctcctcaaaactggtgttgacaaaatgagtcagctttgggcaaagcactaatgacctgtgttcagattcaaccccgaaactgtgtgaaagaaaaggtgtgtgtatctgtccatcacatcagtgaaattgttggccataaattggttcccagtaactatgtggattgctgctgagttctacctgacaaatacaaaaatctcttagattattttctaaaacagaaatatgaactttgccagaatttttaccttatatatgaactctacataggtcacattgtttctccagcatatgacatgagtattgaaattctatcaatgcgtagatataaaatgaagcaaaacaatgactgtcaaatagaaaccaaggttgttaatcttgaatgattcatgagatgtaaaaaattgtcatgtttcatacccaactttattgtaatgccagtgaaaacataaaaaaacttcctagaagtcaatatatatgaccacatattataatttctattcattttatatcatttagtaacattaaaacttgacaaagtgatataaaggagatacattgaaacaactaataaaataaatatccagtaaaaattgatgagaaaaagcacactagtaacgtagacctatttctagtaaaattgattggtaaaaagagaaaaagcacaatagcagattcatctggaataacaaaaaacctaggatagcaaaaactcttctcaaggataaaagaacctctggtggaatcaccatgcccgacctaaagatgtactacagagcaattgtgataaaatctgcatggtactggtataatgacagacaagtagaccaatggaacagaattgaagacccagagatgaacccacacacctatggtcatttgatctttgacaagggagctaaaactatccagtggaaaaaagacagcattttcaacaaatggtgctggcacaactggctgttatcatgtagaagatttcgaattgatccagttctatctccttgtactaaggtcaaatctaagtggattaaggatctccacataaaaccagagacactgaaacttatagaggagaaagtagggaaaagcctcaaagatatgggtacaggggaaaaattcctgaatagaacagcaatggcttgtgctgtaagatcgagaatcgataaatgggacctcataaaattgcaaagcttctgcaaggcaaaagacaccgtcaataagacaaaaagaccaccaacagattgggaaaggatctttacctatcccaaatcggacaggggactaatatccaatatatataaagaactcaagaaggtagactccataaaatcaaataaccccattaaaaaatggggctcagaactgaacaaagatttctcacccgaggaataccgaatggcagagaagcacctgaaaaaatgttcaacatctttaatcatcagggaaatgcaaatcaaaacaaccctgagattccacctcacaccagtcagaatggctaagatgaaaaattcaggtgacagcagatgctggcgaggatgtggagaaagaggaatactcctccattgttggttggattgcaagcttgtacaaccactctggaaatcagtctggcggttcctcagaaaattggacatagtactaccggaagatccagcaatacctctcctgggcatatatccagaagatgccccaaccgataagaaggacacatgctccactatgttcatagcagccctatttataatagccagaagctggaaagaacccagatgcccctcaacagaggaatggatacagaaaatgtggtacatttacacaatggagtactactcagctattaaaaagaatgaatttatgaaattcctagccaaatggatggacctggagggcatcatcctgagtgaggtaacccaatcacaaaggaactctcacaatatgtactcactgataagtggatattagcccagaaacttaggatacccaagatataagatacaatttgttaaacgcatgaaactcaagaagaacaaagaccaaagtgtggatactgtgccccttcttagaattgggaacaaaacacccatggaaagagttacagagatcaagtttagagctgtgacgaaaggatggaccatctaaagactgccatatccagggatccatcccataatcagcttccaaacactgacaccattgcatacactagcaagattttatcgaaaggacccagatgtagctgtctcttgtgagactatgccggggcctagcaaacacagaagtggatgctcacagtcagctattgaatggaccacagggcccccaatggaggaatagagaaagcacccaaggaactaaagggaactgcaaccctataggtggaacaacaatatgaactaagcagtaccccagagctcttgtctctagctgcatatgtatcaaaagatggcctagtcggccatcactgcagggagaggcccattggacttgcaaactttatatgccccagtacagggaaatgccagggccaaaaagggggagtgggtgggtaggggagtaggggggggtatgggggacttttggtatagcattggaaatgtaaatgagctaaatacctaataaaaaatggaaaaaaaagcacaatatatacttatgttagtaatgaaaagctacgagcaccaacacagtaacagtttaaaaaacaatgaaagttaaaaactggtgcagccacagataattcagtcatcaccagtggctcatcaaggaaatgtctctgtgacatagatggagaccattacagaaaagcatgtccaatcaatatgtggacatgtgagccccagtcgcagtgaacacatctacgactcaactcttgtacctaaaccttcagatcactgttgaaaaggggatggaaatattgtgagagccagagggtcacggagtttcctgggagactgtgtctcttaacagtgtcagaaagtacactcaaaagtctcaccaacaaggctgtcccaacatgagctgaacaagaaccacaccaatagatatgataatgtgaacaggttagtaacaggggtcccaggaagcctcaactctgtataaagaacaacagacagctaataaacactaagaacagaagaaatagcaccaatcggtatccaatacctgtgtcatccttgaaaatatacaaataaccttatacagactgagaaagttgtacttaagtatttaagaatgtatggtatacataatatatgtgaatgtgtagatttatattggagtgtgtatatatatatatatgtgtgtgtatacacacacacacacacacacacacacacacacatataatacacataaataagaggtcatgaatttgaggattagcaaaaatgggtacatagaagtatttaaagggaagaagaaaattatttaacaatattataatttcaaaaaaagaaataatttacaaaattggtgtattttgaaacagctataaaagaacctaatgaaaacaataattcctattttatttttgctctcccctcatcttataagagaattggccatgctggaaaacatgaattaatgtaatttccctgtgtatttctgagtaaaaattttgaaaagatatacctgattataaacaaatagaggtatgttcccttgaccaaacaaatgttagtgtgaaatttattaaataaggtacccttgagacaagcagtgctactataaagaaaagcatacttgcttgttttctaggagggatcaagctgatcatagtgtgtgactgtacccactctttattgaacctcggagtgagttatggctttgtaaaggaggttctcacggcactgagtagagtaagtaactcacttggaccctcggctagtgagcacagaggcttctattctaaaccgaaagatcctcctcattccagaccagacacatgtccagggggactctgcttccttagagtccagggaaacattgtctagtggtcgggcactgtttctatttggctggcctgatttaacaatatacaacaatagtccttgatgaaaagatttatatgaattaatcttatggaagtatttccacccttgagtttctgtgcgggaaaaaaagtgttctaatccttaacttagtattaaaacaggtgggatatgaatctataaaattgacctcaatttgacaaaggaagtaaatactcttataatacctttattactcaattattttattcccaaagtcaaattgaggttttttgtttcttgggggttttttgtttgtttttttgttttgtttgttgggggatttttggttgtttgtttatttgtttgtttgtcaaacgtcctgggacctcctatgacaaggaactgtttttcatttgcttgtagtctggaagagctttgaaaacactgtcagggatggtcatcatggggtctcagagggtctacctgtgagatgatgatgtcatcctagtggctatcaaatgagctgagcttagggttgaacttaatgactagaagtccagcaacaaaaagcatcctttaaggggtcctcactggatggcatgatgccaaacaacaagatttatgtaactgatatactctaaaatggtggaagattgtgtcaagcaaatataaaggcaactaaatggtgtgatctatgtgaaaagccagatcgagtatctgaaagcatagccttcagtagattccttctctggtttctcccttccttctcaactttggcatccttctgttcctgtctgggaaagccctggctttgattcaacaatcacagcctaccaaggctgtaagatctttcaatatgccccagtttcatagggtgggagcaagatggccataaagcagaggtgaccttgtcttggggtccccacaccacataggaagcatggaatgacttggagactgcgtcgtgtttcctgtaattattagtcatggtgctttagaagagcacagttgctgaagatgattgcctagaagctttccaaatacttggcgcttcacacagatagttttagccaactgtaatgacagtaaagaatcaaagagaatccaaaagaacagaacttacccctgagtttaattttgttttggattgacccttcctgcaaaataaaccttcagtctgatccttgcctttccttcagtcctgtctcacaggggtgaactgagtgctggggatgaagtcctcagactctgtttggaatattagaaatggtctggttttgaatatttgggtcatgttcacttttgatataaactttaagacgtctttgcgtcatggctcagtttttgaagcagaaaagttgaacctttcagacaacctaaacccctttgtcttggaaactataaataattgagttttgtagccatgaagttctgaaccgtgtcaaaaaaaaaaaaagtatcttggaaaactagttctgaaaacctaaggctggcaaagaagttggcaagctgaaggagaaaatgatagagagttatgttttgtggtaagggagctgaaaaggaggaaaaatgaggaattgttgtcaatttaaaattttgtattaaataaacttgtagtacatgcttgctgagatcaacaagacttttcatctacgtaaatacagctacggtgatcttaaatgtgtgttcaaagcctagcatgtggatttctaattattttaactaactgacaagtaagaccatttgtactcataatctacaacatgatgttttaagatacatatacatgttggaatggccaaactgaataaacatatgcctcgtctcaacatgtttaccacctttctgaataagtacacttgaaaaatctcctctcagtaacttctacatgcataatatattaatggtagtcaccgtgttgtataccagatctccagacctcttatttaactgaaactcggtatcctttgtacatctcccccacatcctccgtgccccctttccttaccccaactgctggtaaacaccactccatttcctgtttctaccagttcatttttcattttaggactgtctttccctaggttatttcacttgacacaatgtcaggttcatctgtgttgtcacaactggcggagttttatatatatattttaaagctgggtactgttcccgtgtgtagttagagcacatctgctttatccattcagcttctggtagctattaggttgttaccatgtcttgcccattatgaatttcactgcattgaacatgggtgtagagcccgctctacaaaatgctaatctcactcatttggttctaatccagaagtgggaatgagagaccatatggtagcccgatttctacttttcttagggacttctgcactttggcactgaactattggcagttccactttatatttacatctgtactgtagaaggattctttctcacccttcctttctccacacttgtcagctctgtcttttttctaaaagccgtcctgacaagtgtggcttggctttgcaatttccttaacaactagtgatgttgagcatttcatcgccttgctcttggccttttaaaggtgtctcatcttgagaaatgtttggttttattttctgcccagtcttagcaaagtttacttgctgttgagttctcaagttccttatacattttgaatactaactcatcagatatatgcttagaaaacattgtcttccgacttataggctcacttgccattctgttaattatttcttttgttatgcagagcctttccaatttgatctagttccattttccttccactttgttttctttcctggtctgtccatctatacaaaacttcattgctaagactagtatcaaggcacaagtcccttccgctcgactcgagactcgagccccgggctaccttgccagcagagtcttgcccaacacccgcaagggtccacacgggactccccacgggaccctaagacctctggtgagtggatcacagtgcctgccccaatccaatcgcgcggaacttgagactgcggtacatagggaagcaggctacccgggcctgatctggggcacaagtcccttccgctcgactcgagactcgagccccgggctaccttgacagcagagtcttgcccaacacccgcaagggtccacacgggactccccacgggaccctaagacctctggtgagtggatcacagtgcctgccccaatccaatcgcgcggaactcgagactgcggtacatagggaagcaggctacccgggcctgatctggggcacaagtcccttccgctcgactcgagactcgagccccgggctaccttgacagcagagtcttgcccaacacccgcaagggcccacacgggactccccacgggaccctaagacctctggtgagtggaacacagcgcctaccccaatccaatcgcgtggaacttgagactgcggtacatagggaagcaggctacccgggcttgatctggggcacaaaccccttccactccactcgagccccggctaccttgccagctgagtcgcctgacacccgcaagggcccacacaggattccacacgtgatcctaagacctctagtgagtggaacacaacttctgccaggagtctggttcgaacaccagatatctgggtacctgccttgcaagaagagagcttgcctgcagagaatactctgcccactgaaactaaggagagtgctaccctccaggtctgctcatagaggctaacagagtcacctgaagaacaagctcttaacagtgacaactaaaacagctagcttcagagattaccagatggcgaaaggcaaacgtaagaatcctactaacagaaatcaagaccactcaccatcatcagaacgcagcactcccaccccacctagtcctgggcaccccaacacaaccgaaaatctagacccagatttaaaaacatttctcatgatgatgatagaggacatcaagaaggactttcataagtcacttaaagatttacaggagagcactgctaaagagttacaggctcttaaagaaaagcaggaaaacacagccaaacaggtgatggaaatgaacaaaaccatactagaactaaaaggggaagtagacacaataaagaaaacccaaagcgaggcaacgctggagatagaaaccctaggaaagagatctggaaccatagatgcgagcatcagcaacagaatacaagaaatggaagagagaatctcaggtgcagaagattccatagagaacatcgacacaacagtcaaagaaaatacaaaatgcaaaaggatcctaactcaaaacatccaggtaatccaggacacaatgagaagaccaaacctacggataataggaattgatgagaatgaagattttcaacttaaagggccagctaatatcttcaacaaaataatagaagaaaacttcccaaacataaaaaaaagagatgcccatgatcatacaagaagcatacagaactccaaatagactggaccagaaaagaaattcctcccgacacataataatcagaacaacaaatgcactaaataaagatagaatattaaaagcagtaagggagaaaggtcaagtaacatataaaggaaggcctatcagaattacaccagacttttcaccagagactatgaaagccagaagagcctggacagatgttatacagacactaagagaacacaaatgccagcccaggctactatacccggccaaactctcaattaccatagatggagaaaccaaagtattccacgacaaaaccaagttcacacaatatctttccacgaatccagcccttcaaaggataataacagaaaagaagcaatacaaggacggaaatcacgccctagaacaaccaagaaagtaatcattcaacaaaccaaaaagaagacagccacaagaacagaatgccaactctaacaacaaaaataaaagggagcaacaattacttttccttaatatctcttaatatcaatggactcaattccccaataaaaagacatagactaacagactggctacacaaacaggacccaacattctgctgcttacaggaaacccatctcagggaaaaagacagacactacctcagagtgaaaggctggaaaacaattttccaagcaaatggactgaagaaacaagctggagtagccattttaatatcggataaattcgacttccaacccaaagttatcaaaaaagacaaggagggacacttcatactcatcaaaggtaaaatcctccaagaggaactctcaattctgaatatctacgcaccaaatgcaagggcagccacattcattagagacactttagtaaagctcaaagcatacattgcacctcacacaataatagtgggagacttcaacacaccactttcttcaaaggacagatcgtggaaacagaaactaaacagggacacagtgaaactaacagaagttatgaaacaaatggacctgacagatatctacagaacattttatcctaaaacaaaaggatataccttcttctcagcacctcacgggaccttctccaaaattgaccatataattggtcacaaaacaggcctcaatagatacaaaaatattgaaattgtcccatgtatcctatcagaccaccatggcctaagactgatcttcaataacaacataaataatggaaagccaacattcacgtggaaactgaataacactcttctcaatgataccttggtcaaggaaggaataaagaaagaaattaaagactttttagagtttaatgaaaatgaagccacaacgtacccaaacctatgggacacaatgaaagcatttctaagagggaaactcatagcgctgagtgcctccaagaagaaacgggagacagcacatactagcagcttgacaacacatctaaaagccctagaaaaaaaggaagcaaattcacccaagaggagtagacggcaggaaataatcaaactcaggggtgaaatcaaccaagtggaaacaagaagaactattcaaagaattaaccaaacgaggagttggttctttgagaaaatcaacaagatagataaacccttagctagactcactaaagggcacagggacaaaatcctaattaacaaaatcagaaatgaaaagggagacataacaacagatcctgaagaaatccaaaacaccatcagatccttctacaaaaggctatactcaacaaaactggaaaacctggacgaaatggacaaatttctggacagataccaggtaccaaagttgaatcaggatcaagttgaccatctaaacagtcccatatcacctaaagaaatagaagcagttattaatagtctcccaaccaaaaaaagcccaggaccagatgggtttagtgcagagttctatcagaccttcaaagaagatctaattccaattctgcacaaactatttcacaaaatagaagtagaaggtactctacccaactcattttatgaagccactattactctgatacctaaaccacagaaagatccaacaaagatagagaacttcagaccaatttctcttatgaatatcgatgcaaaaatcctcaataaaattctcgctaaccgaatccaagaacacattaaagcaatcatccatcctgaccaagtaggttttattccagggatgcagggatggtttaatatacgaaaatccatcaatgtaatccattatataaacaaactcaaagacaaaaaccacatgatcatctcgttagatgcagaaaaagcatttgacaagatccaacacccattcatgataaaagttttggaaagatcaggaattcaaggcccatacctaaacatgataaaagcaatctacagcaaaccagtagccaacatcaaagtaaatggagagaagctggaagcaatcccactaaaatcagggactagacaaggctgcccactttctccctaccttttcaacatagtacttgaagtattagccagagcaattcgacaacaaaaggagatcaaggggatacaaattggaaaagaggaagtcaaaatatcactttttgcagatgatatgatagtatatataagtgaccctaaaaattctaccagagaactcctaaacctgataaacagcttcggtgaagtagctggatataaaataaactcaaacaagtcaacggcctttctctatacaaagaataaacaggctgagaaagaaattagggaaacaacacccttctcaatagtcacaaataatataaaatatcttggcgtgactctaactaaggaggtgaaagatctgtatgataaaaacttcaaatctctgaagaaagaaattaaagaagatctcagaagatggaaagatctcccatgctcatggattggcaggatcaacattgtaaaaatggctatcttgccaaaagcaatctacagattcaatgcaatccccatcaaaattccaactcaattcttcaacgaattggaaggagcaatttgcaaatttgtctggaataacaaaaaacctaggatagcaaaaagttttctcaaggataaaagaacttctggtggaatcaccatgccagacctaaagctttactacagagcaattgtgataaaaactgcatggtactggtatagagacagacaagtagaccaatggaatagaattgaagatccagaaatgaacccacacacctatggtcacttgatcttcgacaagggagctaaaaccacccagtggaagaaagacagcattttcaacaattggtgctggcacaactggttgttatcgtgtagaagaatgcgaatcgatccatacttatctccttgtactaaggtcaaatctaagtggatcaaggaacttcacataaaaccagagacactgaaacttatagaggagaaagtggggaaaagccttgaagatatgggcacaggggaaaaattcctgaacagaacagcaatggcttgtgctgtaagatcgagaatcgacaaatgggacctaatgaaactccaaagtttctgcaaggcaaaagacaccgtcaataagacaaaaagaccaccaacagattgggaaaggatctttacctatcctaaatcagataggggactaatatccaacatatataaagaactcaagaaggtggacttcagaaaatcaaataaccccattaaaaaatggggctcagaactgaacaaagatttctcacccgaggaataccgaatggcagagaagcacctgaaaaaatgttcaacatctttaatcatcagggaaatgcaaatcaaaacaaccctgagattccacctcacaccagtcagaatggctaagatgaaaaattcaggtgacagcagatgctggcgaggatgtggagaaagaggaatactcctccattgttggttggattgcaagcttgtacaaccactctggaaatcagtctggcggttcctcagaaaattggacatagtactaccggaagatccagcaatacctctcctgggcatatatccagaagatgccccaaccgataagaaggacacatgctccactatgttcatagcagccctatttataatagccagaagctggaaagaacccagatgcccctcaacagaggaatggatacagaaaatgtggtacatttacacaatggagtactactcagctattaaaaagaatgaatttatgaaattcctagccaaatggatggacctggagggcatcatcctgagtgaggtaacccaatcacaaaggaactctcacaatatgtactcactgataagtggatattagcccagaaacttaggatacccaagatataagatacaatttgttaaacgcatgaaactcaagaagaacaaagaccaaagtgtggatactgtgccccttcttagaattgggaacaaaacacccatggaaagagttacagagatcaagtttagagctgtgacgaaaggatggaccatctaaagactgccatatccagggatccatcccataatcagcttccaaacactgacaccattgcatacactagcaagattttatcgaaaggacccagatgtagctgtctcttgtgagactatgccggggcctagcaaacacagaagtggatgctcacagtcagctattgaatggaccacagggcccccaatggaggaatagagaaagcacccaaggaactaaagggaactgcaaccctataggtggaacaacaatatgaactaagcagtaccccagagctcttgtctctagctgcatatgtatcaaaagatggcctagtcggccatcactgcagggagaggcccattggacttgcaaactttatatgccccagtacagggaaatgccagggccaaaaagggggagtgggtgggtaggggagtaggggggggtatgggggacttttggtatagcattggaaatgtaaatgagctaaatacctaataaaaaatggaaaaaaaagcacaatatatacttatgttagtaatgaaaagctacgagcaccaacacagtaacagtttaaaaaacaatgaaagttaaaaactggtgcagccacagataattcagtcatcaccagtggctcatcaaggaaatgtctctgtgacatagatggagaccattacagaaaagcatgtccaatcaatatgtggacatgtgagccccagtcgcagtgaacacatctacgactcaactcttgtacctaaaccttcagatcactgttgaaaaggggatggaaatattgtgagagccagagggtcacggagtttcctgggagactgtgtctcttaacagtgtcagaaagtacactcaaaagtctcaccaacaaggctgtcccaacatgagctgaacaagaaccacaccaatagatatgataatgtgaacaggttagtaacaggggtcccaggaagcctcaactctgtataaagaacaacagacagctaataaacactaagaacagaagaaatagcaccaatcggtatccaatacctgtgtcatccttgaaaatatacaaataaccttatacagactgagaaagttgtacttaagtatttaagaatgtatggtatacataatatatgtgaatgtgtagatttatattggagtgtgtatatatatatatatgtgtgtgtatacacacacacacacacacacacacacacacacatataatacacataaataagaggtcatgaatttgaggattagcaaaaatgggtacatagaagtatttaaagggaagaagaaaattatttaacaatattataatttcaaaaaaagaaataatttacaaaattggtgtattttgaaacagctataaaagaacctaatgaaaacaataattcctattttatttttgctctcccctcatcttataagagaattggccatgctggaaaacatgaattaatgtaatttccctgtgtatttctgagtaaaaattttgaaaagatatacctgattataaacaaatagaggtatgttcccttgaccaaacaaatgttagtgtgaaatttattaaataaggtacccttgagacaagcagtgctactataaagaaaagcatacttgcttgttttctaggagggatcaagctgatcatagtgtgtgactgtacccactctttattgaacctcggagtgagttatggctttgtaaaggaggttctcacggcactgagtagagtaagtaactcacttggaccctcggctagtgagcacagaggcttctattctaaaccgaaagatcctcctcattccagaccagacacatgtccagggggactctgcttccttagagtccagggaaacattgtctagtggtcgggcactgtttctatttggctggcctgatttaacaatatacaacaatagtccttgatgaaaagatttatatgaattaatcttatggaagtatttccacccttgagtttctgtgcgggaaaaaaaagtgttctaatccttaacttagtattaaaacaggtgggatatgaatctataaaattgacctcaatttgacaaaggaagtaaatactcttataatacctttattactcaattattttattcccaaagtcaaattgaggttttttgtttcttgggggttttttgtttgtttttttgttttgtttgttgggggatttttggttgtttgtttatttgtttgtttgtcaaacgtcctgggacctcctatgacaaggaactgtttttcatttgcttgtagtctggaagagctttgaaaacactgtcagggatggtcatcatggggtctcagagggtctacctgtgagatgatgatgtcatcctagtggctatcaaatgagctgagcttagggttgaacttaatgactagaagtccagcaacaaaaagcatcctttaaggggtcctcactggatggcatgatgccaaacaacaagatttatgtaactgatatactctaaaatggtggaagattgtgtcaagcaaatataaaggcaactaaatggtgtgatctatgtgaaaagccagatcgagtatctgaaagcatagccttcagtagattccttctctggtttctcccttccttctcaactttggcatccttctgttcctgtctgggaaagccctggctttgattcaacaatcacagcctaccaaggctgtaagatctttcaatatgccccagtttcatagggtgggagcaagatggccataaagcagaggtgaccttgtcttggggtccccacaccacataggaagcatggaatgacttggagactgcgtcgtgtttcctgtaattattagtcatggtgctttagaagagcacagttgctgaagatgattgcctagaagctttccaaatacttggcgcttcacacagatagttttagccaactgtaatgacagtaaagaatcaaagagaatccaaaagaacagaacttacccctgagtttaattttgttttggattgacccttcctgcaaaataaaccttcagtctgatccttgcctttccttcagtcctgtctcacaggggtgaactgagtgctggggatgaagtcctcagactctgtttggaatattagaaatggtctggttttgaatatttgggtcatgttcacttttgatataaactttaagacgtctttgcgtcatggctcagtttttgaagcagaaaagttgaacctttcagacaacctaaacccctttgtcttggaaactataaataattgagttttgtagccatgaagttctgaaccgtgtcaaaaaaaaaaaaagtatcttggaaaactagttctgaaaacctaaggctggcaaagaagttggcaagctgaaggagaaaatgatagagagttatgttttgtggtaagggagctgaaaaggaggaaaaatgaggaattgttgtcaatttaaaattttgtattaaataaacttgtagtacatgcttgctgagatcaacaagacttttcatctacgtaaatacagctacggtgatcttaaatgtgtgttcaaagcctagcatgtggatttctaattattttaactaactgacaagtaagaccatttgtactcataatctacaacatgatgttttaagatacatatacatgttggaatggccaaactgaataaacatatgcctcgtctcaacatgtttaccacctttctgaataagtacacttgaaaaatctcctctcagtaacttctacatgcataatatattaatggtagtcaccgtgttgtataccagatctccagacctcttatttaactgaaactcggtatcctttgtacatctcccccacatcctccgtgccccctttccttaccccaactgctggtaaacaccactccatttcctgtttctaccagttcatttttcattttaggactgtctttccctaggttatttcacttgacacaatgtcaggttcatctgtgttgtcacaactggcggagttttatatatatattttaaagctgggtactgttcccgtgtgtagttagagcacatctgctttatccattcagcttctggtagctattaggttgttaccatgtcttgcccattatgaatttcactgcattgaacatgggtgtagagcccgctctacaaaatgctaatctcactcatttggttctaatccagaagtgggaatgagagaccatatggtagcccgatttctacttttcttagggacttctgcactttggcactgaactattggcagttccactttatatttacatctgtactgtagaaggattctttctcacccttcctttctccacacttgtcagctctgtcttttttctaaaagccgtcctgacaagtgtggcttggctttgcaatttccttaacaactagtgatgttgagcatttcatcgccttgctcttggccttttaaaggtgtctcatcttgagaaatgtttggttttattttctgcccagtcttagcaaagtttacttgctgttgagttctcaagttccttatacattttgaatactaactcatcagatatatgcttagaaaacattgtcttccgacttataggctcacttgccattctgttaattatttcttttgttatgcagagcctttccaatttgatctagttccattttccttccactttgttttctttcctggtctgtccatctatacaaaacttcattgctaagactagtatcaaggcacaagtcccttccgctcgactcgagactcgagccccgggctaccttgccagcagagtcttgcccaacacccgcaagggtccacacgggactccccacgggaccctaagacctctggtgagtggatcacagtgcctgccccaatccaatcgcgcggaacttgagactgcggtacatagggaagcaggctacccgggcctgatctggggcacaagtcccttccgctcgactcgagactcgagccccgggctaccttgacagcagagtcttgcccaacacccgcaagggtccacacgggactccccacgggaccctaagacctctggtgagtggatcacagtgcctgccccaatccaatcgcgcggaactcgagactgcggtacatagggaagcaggctacccgggcctgatctggggcacaagtcccttccgctcgactcgagactcgagccccgggctaccttgacagcagagtcttgcccaacacccgcaagggcccacacgggactccccacgggaccctaagacctctggtgagtggaacacagcgcctaccccaatccaatcgcgtggaacttgagactgcggtacatagggaagcaggctacccgggcttgatctggggcacaaaccccttccactccactcgagccccggctaccttgccagctgagtcgcctgacacccgcaaggggcccacacaggattccacacgtgatcctaagacctctagtgagtggaacacaacttctgccaggagtctggttcgaacaccagatatctgggtacctgccttgcaagaagagagcttgcctgcagagaatactctgcccactgaaactaaggagagtgctaccctccaggtctgctcatagaggctaacagagtcacctgaagaacaagctcttaacagtgacaactaaaacagctagcttcagagattaccagatggcgaaaggcaaacgtaagaatcctactaacagaaatcaagaccactcaccatcatcagaacgcagcactcccaccccacctagtcctgggcaccccaacacaaccgaaaatctagacccagatttaaaaacatttctcatgatgatgatagaggacatcaagaaggactttcataagtcacttaaagatttacaggagagcactgctaaagagttacaggctcttaaagaaaagcaggaaaacacagccaaacaggtgatggaaatgaacaaaaccatactagaactaaaaggggaagtagacacaataaagaaaacccaaagcgaggcaacgctggagatagaaaccctaggaaagagatctggaaccatagatgcgagcatcagcaacagaatacaagaaatggaagagagaatctcaggtgcagaagattccatagagaacatcgacacaacagtcaaagaaaatacaaaatgcaaaaggatcctaactcaaaacatccaggtaatccaggacacaatgagaagaccaaacctacggataataggaattgatgagaatgaagattttcaacttaaagggccagctaatatcttcaacaaaataatagaagaaaacttcccaaacataaaaaaaagagatgcccatgatcatacaagaagcatacagaactccaaatagactggaccagaaaagaaattcctcccgacacataataatcagaacaacaaatgcactaaataaagatagaatattaaaagcagtaagggagaaaggtcaagtaacatataaaggaaggcctatcagaattacaccagacttttcaccagagactatgaaagccagaagagcctggacagatgttatacagacactaagagaacacaaatgccagcccaggctactatacccggccaaactctcaattaccatagatggagaaaccaaagtattccacgacaaaaccaagttcacacaatatctttccacgaatccagcccttcaaaggataataacagaaaagaagcaatacaaggacggaaatcacgccctagaacaaccaagaaagtaatcattcaacaaaccaaaaagaagacagccacaagaacagaatgccaactctaacaacaaaaataaaagggagcaacaattacttttccttaatatctcttaatatcaatggactcaattccccaataaaaagacatagactaacagactggctacacaaacaggacccaacattctgctgcttacaggaaacccatctcagggaaaaagacagacactacctcagagtgaaaggctggaaaacaattttccaagcaaatggactgaagaaacaagctggagtagccattttaatatcggataaattcgacttccaacccaaagttatcaaaaaagacaaggagggacacttcatactcatcaaaggtaaaatcctccaagaggaactctcaattctgaatatctacgcaccaaatgcaagggcagccacattcattagagacactttagtaaagctcaaagcatacattgcacctcacacaataatagtgggagacttcaacacaccactttcttcaaaggacagatcgtggaaacagaaactaaacagggacacagtgaaactaacagaagttatgaaacaaatggacctgacagatatctacagaacattttatcctaaaacaaaaggatataccttcttctcagcacctcacgggaccttctccaaaattgaccatataattggtcacaaaacaggcctcaatagatacaaaaatattgaaattgtcccatgtatcctatcagaccaccatggcctaagactgatcttcaataacaacataaataatggaaagccaacattcacgtggaaactgaataacactcttctcaatgataccttggtcaaggaaggaataaagaaagaaattaaagactttttagagtttaatgaaaatgaagccacaacgtacccaaacctatgggacacaatgaaagcatttctaagagggaaactcatagcgctgagtgcctccaagaagaaacgggagacagcacatactagcagcttgacaacacatctaaaagccctagaaaaaaaggaagcaaattcacccaagaggagtagacggcaggaaataatcaaactcaggggtgaaatcaaccaagtggaaacaagaagaactattcaaagaattaaccaaacgaggagttggttctttgagaaaatcaacaagatagataaacccttagctagactcactaaagggcacagggacaaaatcctaattaacaaaatcagaaatgaaaagggagacataacaacagatcctgaagaaatccaaaacaccatcagatccttctacaaaaggctatactcaacaaaactggaaaacctggacgaaatggacaaatttctggacagataccaggtaccaaagttgaatcaggatcaagttgaccatctaaacagtcccatatcacctaaagaaatagaagcagttattaatagtctcccaaccaaaaaaagcccaggaccagatgggtttagtgcagagttctatcagaccttcaaagaagatctaattccaattctgcacaaactatttcacaaaatagaagtagaaggtactctacccaactcattttatgaagccactattactctgatacctaaaccacagaaagatccaacaaagatagagaacttcagaccaatttctcttatgaatatcgatgcaaaaatcctcaataaaattctcgctaaccgaatccaagaacacattaaagcaatcatccatcctgaccaagtaggttttattccagggatgcagggatggtttaatatacgaaaatccatcaatgtaatccattatataaacaaactcaaagacaaaaaccacatgatcatctcgttagatgcagaaaaagcatttgacaagatccaacacccattcatgataaaagttttggaaagatcaggaattcaaggcccatacctaaacatgataaaagcaatctacagcaaaccagtagccaacatcaaagtaaatggagagaagctggaagcaatcccactaaaatcagggactagacaaggctgcccactttctccctaccttttcaacatagtacttgaagtattagccagagcaattcgacaacaaaaggagatcaaggggatacaaattggaaaagaggaagtcaaaatatcactttttgcagatgatatgatagtatatataagtgaccctaaaaattctaccagagaactcctaaacctgataaacagcttcggtgaagtagctggatataaaataaactcaaacaagtcaacggcctttctctatacaaagaataaacaggctgagaaagaaattagggaaacaacacccttctcaatagtcacaaataatataaaatatcttggcgtgactctaactaaggaggtgaaagatctgtatgataaaaacttcaaatctctgaagaaagaaattaaagaagatctcagaagatggaaagatctcccatgctcatggattggcaggatcaacattgtaaaaatggctatcttgccaaaagcaatctacagattcaatgcaatccccatcaaaattccaactcaattcttcaacgaattggaaggagcaatttgcaaatttgtctggaataacaaaaaacctaggatagcaaaaagttttctcaaggataaaagaacttctggtggaatcaccatgccagacctaaagctttactacagagcaattgtgataaaaactgcatggtactggtatagagacagacaagtagaccaatggaatagaattgaagatccagaaatgaacccacacacctatggtcacttgatcttcgacaagggagctaaaaccacccagtggaagaaagacagcattttcaacaattggtgctggcacaactggttgttatcgtgtagaagaatgcgaatcgatccatacttatctccttgtactaaggtcaaatctaagtggatcaaggaacttcacataaaaccagagacactgaaacttatagaggagaaagtggggaaaagccttgaagatatgggcacaggggaaaaattcctgaacagaacagcaatggcttgtgctgtaagatcgagaatcgacaaatgggacctaatgaaactccaaagtttctgcaaggcaaaagacaccgtcaataagacaaaaagaccaccaacagattgggaaaggatctttacctatcctaaatcagataggggactaatatccaacatatataaagaactcaagaaggtggacttcagaaaatcaaataaccccattaaaaaatggggctcagaactgaacaaagaattctcacctgaggaataccgaatggcagagaagcacttgaaaaaatgttcaacatccttaatcatcagggaaatgcaaatcaaaacaaccctgagattccacctcacaccagtcagaatggctaagatcaaaaattcaggtgacagcagatgctggcgaggatgtggagaaagaggaacactcctccattgttggtgggagtgcaggcttgtacaaccactctggaaatcagtctggcggttcctcagaaaactggacatagtactaccggaggatccagcaatacctctcctgggcatatatccagaagatgccccaacaggtaagaaggacacatgctccactatgttcatagcagccttatttataatagccagaagctggaaagaacctagatgcccctcaacagaggaatggatacagaaaatgtggtacatctacacaatggagtactactcagctattaaaaagaatgaatttatgaaattcctagccaaatggatggacctggagggcatcatcctgagtgaggtaacacattcacaaagaaactcacacaatatatattcactgataagtggatattagccccaaacctaggatacccaagatataagatataatttgctaaacacatgaaactcaaggagaatgaagactgaagtgtggacactatgcccctccttagatttgggaacaaaacacccatggaaggagttacagagacggagtttggagctgagatgaaaggatggaccatgtagagactgccatagccagggatccaccccataatcagcatccaaacgctgacaccattgcatacacttgcaagattttattgaaaggacgcagatgtagctgtctcttgtgagactatgccggggcccagcaaacacagaagtggatgctcacagtcagctaatggatggatcatagggctcccaatggaggagctagagaaagtagccaaggagctaaagggatctgcaaccctataggtggaacaacattatgagctaaccagtaccccggagctcttgactctagctgcatatatatcaaaagatggcctagtcggccatcactggaaagagaggcccattggacttgcaaactttatatgccccagtacaggggaataccagggccaaaaagggggagtgggtgggcaggggagtgggggtgggtggatatgggggacttttggtatagcattggaaatgtaaatgagttaaatacctaataaaaaatggaaaaaaaaaaaagactagtatcaagaagctttctaggatcccccccccagggggtgtgttgaaagcctaagccatggatatttattcactttgaattggattttgtatttgataaagagaaagacattttattctcttcgaatatggagattcagttttcccaaaaaatatttgcaaatactatctgtgtactaaagaaaagtttgtctatatcttatattaccataaagatgtggtaacaacattagatatatgtcagaaatctgtgtggatatcctcaaatttaaataaatgagaggaaggaaatagcaaagagttaaggagataaacagaagataggcattagcagttaataagtcatggagcattagatatgtaaggtaggaaaagaactggatttgggccgtgtctcccctttacctgtctttctctttctgcttaacacagaccttagtctataatatctgttagacattctttaataaatattttgtttttctccttgtccaaaatatatttctttttaaaaaccattttctttgtttttatttcatatggatgtgtgcgtgccgccaggtatgtatgtgccccacaagcatgcttggtgcactcagaggccagaaaaagggtgttggatcctctggaactgagttaaaggggtttgtgaatcatgaagtcggtgcagagaactgagtctgcaggttctcttaactactgaaccatctcaccaggcccccaaacgtctttctttatcaaaatactttaacttcaccttggttaagatttgcttggaataacttaaattttagttaaaatatttagtcaggctggagagatggctcagtaggtaaaagtgctttttatacaaacatgaaggcctgagtatgaatccccagaaagccagacacttagagcaagtgtctgcaatcttagtattcctatggggaaatagaaggcagaaacagggcaatccccagaagttcacaggctggataaatggtgtacagagtggagaaatgacagagagcctgtctcagacaaggtggaagacaaagaccaatgtctgaggttgtcctctgacttgcatacatgtgctctggcaagcatgcacctatatttacatacatgaatgcacacacacacacacataaattaatcaatcaaccagtcaaaggcaaccagaggtcctgtgtgctagctcaatgacaaagtgcttgcttagtatgcataaaaactttactcaattccagttctggaaaaccattaattaattagttaattaattaagtaagtaagtaagtaagataaaatgtgaaatcacctcatgttgtgaacaaccttcacctttggtttggacggatgggaaagggcatgcatgcagacaatgggtgtgacataatggggacattttaaagcacagacatttaggaacaaattgtttgtgaatgaaggaatagatcagggtggtatgaggacccaggggatcagggaaggccccagagaaatgtacaaacgttcttgggagaggggaagactagagtatgtaaaccgcattgttaagaatttttacctataaaaagtgtacactcagggacatgagaagaaaatgctcctcttcccacaaagtctaaggctgccttagaagcaattcaagctggccaggtttctactgtatacgtaggtaagatgggctttaggaggcttccccaaatactcacctactttgcacatcagtacacatacacactcacacacacacacacacacacacacacacacatatatgaaatcccacacaaatttttcaattctaaccagttcagatattaagtatagctgataatatatttggtttgcatattaatttagaaatgcaagtagattgtacttgtgaagagaaatgtcaagatgctagagacactgggaaacacataaaagatgatttgagggacagggcaattgaaagaaacatcacatggccatctttaaacaaactactaaatgatgaccacattttcagaacctcatagcagacatgtggttttatatgttagaccacaataagtttacccatgctaaagaatcaatggtgtgagacattatatgaaaaggattactccagctgtgccaagatagaagcaagattggagacgtgataaaatgtgggtggtttaggtatgctagtcaccaatgctaaaactaagctcatgctggaaaaggaagtgccagctgctattggtgcacacagcaactagatttaatccaaccaaaagttgacacaaagtttcttcatggacacgtagggaggagaaagggttgtgaacagatgtgcagtgagggctctgcaggtgtgccacttacctgtgaagtggtcctattggaggaaaataagatagatgatatattctctcgtgaggtgtattcaaaaacctgggatgcagggggaacatagaaatacgactgaagaacaacggtgtagagagctgagaatgggagctcctatatccagcacatatgtcaccatgaaggttctgctctcaaaactaaacatggtcagttgttttctcatttgaggaattcctctctgttggcctgagaccccactggaagatgactgccttataccctttctctttgctatatcaaacgtggtccttgtaaattgttattaaaattttaataataagtcatggatttggggatggagaagaatttgcatcgcttcttttgtgggcgtctgactgaaatttgggcttcttttgattacaaatgtgaacagcaaatctgttacacaaagaacatttagcaatgctgttatcagtaggaactgcagacatttctctattctgttattgttgtggttagtttgaaataaagattactacattacttcttagatactgtgttttgcttcattgtttgttttgttttgtttttttatgtatatgtgtgtgttgtgtgcaggtttgtatccatgtgggtgcatatgttagggggcagtagggcagtgtagatgtggaagtgaggggtgggagatctccctatgcccatggtaccactccgtgggcaggaggcagggccacgtctcctgcacctatgccaccagagcagccctgtgccacccaggagagatgcaggcccccctctcctgggtatagcagccaccgagggaaggaaccacccacccactcttccacccttggggtcagttctcccatgctgcccaggccggaggccagctttttaacctttgtagttttcagtatcttagtctaaaagatatagattttcatggttcctacttcatattatcatgggaacaattaaataagaaaatgcatataacattattatctctgaatctaggtcattaaagcttctgatgagaattaactattacttattacgatggagagaaaaataaaaaaatatgtataaattggttttgggtttcaaaataggttgaggaggaaaaactttaaattattctaagttcctttatgtatgatttatggaaataaactatctctagggggtgtgtatatatatcttggtggtagaacacttgtctagtacatgcaaaaccctgcatttggtttttaatattggtagaaatgaatatgagccattcttaaatcaggagtacctggtcacttgtgagttgatcaagatatttgactttttttctaaagaaaagaagatgaaataataacttggcttttcttacaaaaaacacactcagggactctatatccttgccagttgtctgctatgtagtttattgagacttcccagcactgtctggaatttccaaggcttggatgtataaaaataattcactagaactgactccaaatacgtttttatttcggcctgaagtagaagatggatgtgctaggaattaaatggatcagcagaagtcaggcagaaagctgatgttatcctgagtagcagcccttgctgacagaaacttagtacctaccacgaggggggcaagtttactgcaacttggagggcagcaaagaggggtgtatacaaactcctgattcaaaacaacaacaacaccaaaaaaaaaaaaaacaaaaaaacaaaaataaaacaaaacccactaaggttctgacattccaatgtgaatcctcttctggagggcccaggttcaattcccaacacccacatggcagctcaatctgtctacagctccaacactggagcatctggtaccttcacaaacatacatgcagcaaaatgccaacacacatcaaggaccattgagaagaaaaggggtggatgatggccttgttggacatcagtgggaggagaggccctgggacctgagggtgttcagtgccccagagtagtggaatgccagggcaagaggatgggagtgggtagatgagggagcaccctcatagaggcagggggaggagggatgggatgggggcttcagaaggggagacctggaaaggggaaaacatttgaaatgtaaataaagaaaatatccaagaaaattaataataataataataataataataataataaagaaaagggagtggtgggaaatagctttcaaagatactgttcctccgcctgcttgctatctgaggcccatgcagaatagagcgtgctcactgttcccctagtttcttggccaagagaccatagtacagtgatcctctgcttaaccttttttaaaaggccattcattacttttaacaataggttcaatattttatttacttcaaggattgagttcaaggctatcacattaaaatatattgttttttttttttcattttttattaggtatttagctcatttacatttccaatgctataccaaaagtcccccttacccacccacccccactcccctacccacccactccccccctttggccctggcgttcccctgtaccggggcacacgaagtctgcgtgtccaatgggcctctctttccagtgatggccgactaggccatcttttgatacatatgcagctagagtcaagagctcaggggtactggttagttcataatgttgttccacctatagggttgaagatccctttagctccttgggtactttctctagctcctccattgggagccctgtgatccatccattagctgactgtgagcatccacttctgtgtttgctaggccccggcatagtctcacaagagacagctacatctgggtcctttcagtaaaatcttgctagtgtatgcaatggtgtcagcatttggaagctgattatggggtggatccctggatatggcagtctctacatggtccattctttcatctcagctccatactttgtttctgtaactccttccatgggtgttttgttcccacttctaaggaggggcatagtgtccacacttcagtcttcatttttcttgagtttcatgtgtttaggaaattgtatcttatatcgtgggtatcctaggttttgggctagtatccacttatcagtgagtacatattgtgtgagttcctttgtgattgtgttacctcactcaggatgatgctctccaggtccatccatttggctaggaatttcataaattcattctttttaatagctgagtagtactccattgtgtagatgtaccacattttctgtatccattcctctgttgaggggcatctgggttctttccagtttctggctattataaataaggctgctatgaacatagtggagcatgtgtccttcttaccagttggggcttcttctggatatatgcccaggagaggtattgctggatcctccggtagtactatgtccaattttctgaggaaccgccagactgatttccagagtggttgtacaagcctgcaatcccaccaacaatggaggagtgttcctctttctccacatcctcgccagcatctgctgtcacctgaatttttgatcttagccattctcactggtgtgaggtggaatctcagggttgttttgatttgcatttccctgatgattaaggatgttgaacattttttcaggtgcttctctgccattcggtattcctcaggtgagaattctttgttcagttctgagccccattttttaagggggttatttgattttctgaggtccaccttcttgagttctttatatatgttggatattagtcccctatctgatttaggataggtaaagatcctttcccagtctgttggtggtctttttgtcttatagacagtgtcttttgccttgcagaaactttggagtttcattaggtcccatttgtcaattctcgatcttacagcacaagccattgctgttctgttcaggaatttttcccctgtgcccatatcttcaaggcttttccccactttctcctctataagtttgagtgtctctggttttatgtgaagttccttgatccacttagatttgaccttagtacaaggagataagtatggatcgattcgcattcttctacatgataacaaccagttgtgccagcaccaattgttgaaaatgctgtctttcttccactggatggttttggctcccttgtcgaagatcaagtgaccataggtgtgtgggttcatttctgggtcttcaattctattccattggtccacttgtctgtctctataccagtaccatgcagtttttatcacaattgctctgtagtaaagctttaggtcaggcatggtgattccaccagaggttcttttatccttgagaagagtttttgctatcctcggttttttgttattccagatgaatttgcaaattgctccttctaattccttgaagaattgagttggaattttaatggggattgcattgaatctgtagattgcttttggcaagatagccatttttacaatgttggtcctgccaatccatgagcatgggagatctttccatcttctgagatcttctttaatttctttcttcagggacttgaagtttttatcatacagatctttcacttccttcgttagagtcacgccgagatattttatattatttgtggctattgagaagggtgttgtttccctaatttctttctcagcctgtttattctttgtgtagagaaaggccattgacttgtttgagttaattttatatccagctacttcaccgaagctgtttatcaggtttaggagttctctggtggaatttttagggtcacttatatatactatcatatcatctgcaaaaagtgatattttgacttcctcttttccaatttgtatccccttgatctccttttgttgtcgaattgctctggctaatacttcaagtactatgttgaaaaggtagggagaaagtgggcagccttgtctagtccctgattttagtgggattgcttccagcttctctccatttactttgatgttggctactggtttgctgtagattgcttttatcatgtttaggtattggccttgaattcctgatctttccagaacttttatcatgaatgggtgttggatcttgtcaaatgctttttctgcatctaacgagatgatcatgtggtttttgtctttgagtttgtttatataatggattacattgatggattttcgtatattaaaccatccctgcatccctggaataaaacctacttggtcaggatggatgattgctttaatgtgttcttggattcggttagcgagaattttattaagaatttttgcatcgatgttcataagagaaattggtctgaagttctctatctttgttggatctttctgtggtttaggtatcagagtaatagtggcttcataaaatgagttgggtagaataccttctacttctatcttgtgaaaaagtttgtgcagaactggagttagatcttctttgaaggtctgatagaactctgcactaaaccggtctggtcctgggctttttttggctgggagactattaataactgcttctatttctttaggggatatgggactgtttagaaggtcaacttgatcctgattcaactttggtacctggtatctgtccagaaatttgtccatttcgtccaggttttccagttttgttgagtatagccttttgtagaagaatctgatagtgttttggatttcttcaggatctgttgttatgtctcccttttcatttctgattttgttaattaggattttgtccctgtgccctttagtgagtctagctaagggtttatctatcttgttgattttctcaaagaaccaactcctcgtttggttaattctttgaatagttcttcttgtttccacttggttgatttcacccctgagtttgattatttcctgccgtctactcctcttgggtgaatttgcttcctttttttctagagcttttagatgtgttgtcaagctgctagtatgtgctctctcccgttttttcttgaaggcactcatagctatgagtttccctcttagaaatgctttcattgtgtcccaaaggtttgggtacgttgtggcttcattttcattaaactctaaaaagtctttaatatctttctttattccttccttgaccaaggtatcattgagaagagtgttgttcagtttccatgtgaatgttggctttctgttatttattttgttattgaagatcagccttagtgcatggtgatctgataggatacatgggacaatttcaatatttttgaatctgttgaggcctgatttgtgacctattatgtggtcaattttggagaaggtaccatgaggtgctgagaagaaggtatatccttttgttttaggataaaatgttctgtagatatctgtcagatccatttgtttcatcacttctgttagtttcagtgtgtccctgtttagtttctgtttccatgatctgtccattggtgaaagtggtgtgttgaagtctcccactattattgtgtgaggcgcaatgtgtgctttgagctttactaaagtttctttagtgaatgtggctgctcttgtatttggagcatagatattcagaattgagagttcctcttggaggattttacctttgatgagaatgaagtgtccctccttgtcttttttgatgactttgggttggaagtcaatcttatcagatattaggatggctactcctgcttgtttcttcataccatttgcttggaaaattgttttccagcctttcattctgaggtagtgtctatctttttctctgagatgagtttcctgtaagcagcaaaatgttgggtcttgtttgtgtagccagtttgttagtctatgtctttttattggcgagttgagaccattgatgttaagagatattaaggaaaagtaattgttgcttcctgttattttagttgttaaaggtggcattctgttcttgtggctgtcttcttttaggtttgttgagggattaccttcttgttttttctagggcgttgttcccgttcttgtattggtttttttctgttattatcctttgaagggctggattcgtggagagataatgcgtgaatttggttttgtcgtggaatactttggtttctccctctatgataattgagagtttggctgggtatagtagcctgggctgcagtttgtgttctcttagtgtctgtataacatctgtccaggctcttctggctttcatagtctctggtgaaaaatctggtgtaattctgataggcttgcctttatatgttacttgacctttttcccttactgcttttagtattctatctttatttagtgcatttgatgttctgattattatgtgtcgggaggaatttcttttctggtccagtctatttggagttctgtaggcttcttgtatgttcatatgcatctcattctttagatttgggaagttttcttcaacaattttgttgaagatgtttgctggacctttgagttgaaaatcttcattctcatccactcctattatccgtacgtttggtcttcttattgtgtcctggatttcctggatattttgagttaggatctttttgcattttccattttctttgattgttgtgccgatgttctctatggaatcttctgcacctgagattctctcttccatctcttgtattctgttgctgatgctcaaatctatggttccagatttctttcctagggtttctatctctagtgttgcctcgctttgagttttctttattgtgtctacttccctttttaggtctagtatggttttgttcatttccatcacctgtttgtatgttttttcctctttttctgtaaggacttctacctgtttgattgtgttttcctgtttttctttaaggacttgtaactctttagcagtgttctcctgtatttctttaagtgatttattaaagtccttcttgatgtcctctaccatcatcatgagatatgcttttaaatctaggtctaggttctcaggtgtgttggggttccctggactgggcgaagtgggtgtgctgggttctggtgatggtgagtggtcttggttcctgttagtaagattcctccgtttacctttcgccatctggtaatctctggagttagtagttatagttgactctgtttagagattgttcttctggtgattctgttaccgtctatcagcagacctgggagacagattctctcctctgagtttcagtgctcagagcactctctgctggcaagctctcttacagggaaggtgcgcagatatcttgtatttggacctcctcctggccgaagaagaaggcccaaaacaggacctttctcagacactgtgttgctttggcagtccccaggtggtacagactctcacctaagcagactaaattcctaagttccttggagtcccgggaccaagatggcgaccgctgctgctgtggcttaggccgcctccccagccgggtgggcacctgtcctccggtccggaaggtggccggctgtccccggcccacaaagggtgctgcctcagcgcctcagcgcctctgtgcttctgcctgttccagacgctgtcaggttctctggcgcaccctctcacctgttcagactaatttcctaagttcggcgggtctcggaccaagatggcgaccgctgctgctgtggcttaggtcgcctccccagccgggcgggcacctgtcctccggtccggaaggtggccggctgtccccggcccacaaagggtgctgcctcagcgcctctgtgcttctgcctgttccagacgctgtcaggttctctggcgcaccctctcacctgttcagactaatttcctaagttcggcgggtctcggaccaagatggcgaccgatgctgctgtggcttaggccgcctccccagccgggcgggcacctgtcctccggtccggacggtggctggctgtccccggcccacaaagggtgctgcctcagcgcctctgtgctcccgcctgttccagaagctgtcaggttctctggcgcaccctctcacctgttcagactaatttcctaagttcggcgggtctcggaccaagatggcgaccgctgctgctgtggcttaggtcgcctccccagccgggcgggaacctgtcctccggtccggaaggtggccggctgtccccggcccacaaagggtgctgcctcagcgcctctgtgcttctgcctgttccagaagctgtcaggttctctggcgcaccctctcacctgttcagactaatttcctaagttcggcgggtctcggaccaagatggcgaccgctgctgctgtggcttaggtcgcctccccagccgggcgggcacctgtcctccggtccggaaggtggccggctgtccccggcccacaaagggtgctgcctcagcgcctctgtgcttctgcctgttccagacgctctcaggttctctggcgcaccctctcacctgttcagactaatttcctaagttcggcgggtctcggaccaagatggcgaccgctgctgctgtggcttaggccgcctccccagccgggcgggcacctgtcctccggtccggacggtggctggctgtccccggcccacaaagggtgctgcctcagcgcctctgtgcttctgcctgttccagaagctgtcaggttctctggcgcaccctctcacctgttcagactaatttcctaagttcggcgggtctcggaccaagatggcgaccgatgctgctgtggcttaggccgcctccccagccgggcgggcacctgtcctccggtccagacggtggctggctgtccccggcccacaaagggtgctgcctcagcgcctctgtgcttctgcctgttccagaagctgtcaggttctctggcgcaccctctcacctgttcagactaatttcctaagttcggcgggtctcggaccaagatggcgaccgctgctgctgtggcttaggtcgcctccccagccgggcgggcacctcaaaatatattgttttaaaagcctgaagtttatggggtggatccctggataaggcagtctctacatggtccctcctttcatctcagctccaaactttgtctctgtaactccttccaagggtgttttgttcccacttctaaggaggggcatagtgtccacacttcagtcttcatttttcttgagtttcatgtgtttaggaaattgtatcttatatcttgggtatcctaggttttgggctaatatccacttatcagtgagtacatattgtgtgagttcctttgtgaatgtgttacctcactcaggatgatgccctccaggtccatccatttggctaggaatttcataaattcattctttttaatagctgagtagtactccattgtgtagatgtaccacattttctgtatccattcctctgttgaggggcatctgggttctttccagcttctggctataataaataaggctgctatgaacatagtggagcatgtgtccttaccccataatcagaatccaaacgctgacaccattgcatacactagcaagatttttatcgaaaggacccagatgtagctgtctcttgtgagactatgccggggcctagcaaacacagaagtggatgcccacagtaatggatggattacagggctcccaatggaggagctagagaaagtacccaaggagctaaagggatctgcaaccctataggtggatcaacattatgaactaaccagtaccccggagctcttgactctagctgcatatgtatcaaaagatggcctagtcggccatcactgcaaagagaggcccattggacacacaaactttatatgccccagaataggggaacgccagggccaaaaagggggagtgggcgggtaggggagtgggggtgggtgggtatgggggacttttggtatagcattggaaatgtaaatgagctaaatacctaataaaaaatggaaagaaaaaaaaataaataaagccaaaaaaaaaaaaaaagcctgaagtttttactttagatcttgacacaggaagtgaattctccttgaatcatgactaggaagtatgttattcttcttttctgtctttcccagtgaattatgggaaaaatgtaagcatcatcaaaaatcatgagatgataaatgtgaattaaattcacttgaccagtgattttttcccactgtgtgaaaccagattttctaagtttaatgctatccctcagaaaaggactttacaagatgtaaaagtgctctgagcttttgaaagcaccaacagctgtctaggcggagatgaacctaaaccttctaaacgctctacccatttacattacttcatcaaaatgacgagttctctggtttcactttgattattttgtaactgagaggactgtaggaagaaagggttttcactgctgtgttttttgtgacgatcaagattgtcagtaggcaatgagtttccgctgtagcacacaggacaaataaatgaacactttgctgatagggttttccttttatgacagtgagatatttccaggtaatgcacccgtttgctacctctttgtataaaattgtagcattgcataactcattagacctacctgtgaaagctggagtgtttggagaagcaggaagtggacttgcatggatcagtaaaacaatcaggaaatgtttcaggtttccttctgcagaattcacagtcccaggagtccccatgtaagtctccattttgcagacctgtctacagtttttctcctggggtgatggtgatggaaagctaacctgtacaggaattgacccatcacccagtttgtgaccctatggttgtgccttggaaggaactatgtatatacatctgagtttgtttgtttaattgtttgtttgtctgtctttcagagaaactttgatgacaatatactatttcttttagtggtgtgccatcctctattcacattcccttttctggatatctccctcccttccttcccaccccctcctcctttgtttggcttctctatcaagaatgagcagtgtttgttttgctcatgtttgcagtagcaggggaagaatttaagaattgtttcaaaggataggaggactgcaaattgcaggcaactaaacaatactcagttggctaattcggggggaatgctttcaagtgttaaacacacaggaaagatctacaagaaacgtcaggaaaactatacccattatatctggagactgaatatattctaaatactttttaatctaatgaaagaaaactaataattatagtcttttcctttcttccaagtagacattctaaaagcaagcatataaacacaatctctactctgctatccacagaactacaatgagaacacaaattcaatgaactccacattttttgaatggttcagaaagcttaaagtccaatgagtaatctcatgaatgcaaactgtctatgtaaacaatgttggataaggacattttttgttatctatcacatcataagaatttgccccaaatgaagagattttaaaataagaactacttcattgcatttacatatgtactacgaaagagatcaggattgttctcacagtataaacagaaatctcttagagccattcatgtgacaagtagccttggctggagaccccgagatggcttcatttacacatatgcagccttggtgacactcatctgaatgtcagtctctggtggcacttgggagctcctctgtggcttctctgcacagcagtctctaggtagttacactaacagaacagaaccaaactcccagaagaaattccccacggattctcagagatgcagcaaggcttcttagcaaaagtcaagatcccagaacttcacttctacagcattctgtggccagccagaagtaaggccgatcctaattcacagagagatggatttgtgtccatctaacacagagagcccctcccaatggcacttaccacactgtcttacttctctacatagaggagtaaagaacaaaaacagagagagacgtctgatccataagtaagagaaaatgccactagatctcaacaggccaatgacttcataagccacggcttcaagtcagctatgttaagtcttgtatactataataaaataaagaatgatagagagagagagagagagagagagagagagagagagaggaaagtccaaagaagactcaagtgaactagctgaggttagtaatatataaaataaaaacatggataagattaagagaattaaacattacaggaaaaaaaatgaatcaaaagatagaaagttagtaactgacagccatataaaactaaatataaaaaggggaaagtttgaaaagccgaataacaggggccaacccagcggcagctcaaagcacttgctacatgcctcactaggtgaggtcagccctgggttccacacaaggaaagagagaaacaactatggcaggttgtcctgtgacttccatatgcctgttgtgatatgcacatgcatgtatataattttaaaaatgttttaatgtgtcagtatacattctagctcaaagcaggatgaggggctcatgagttccatgcttcaactagggaactataggtcattgatagtgtctgaggagggagagtctacttttgtctgtgggtttgactactggtcggtaaacctggctctagtggaaggccctgcatacatgagtatgtgggcggcacaaggtggactctctgggttatttttttttttttctgaagcacatcaagttggggatttatgtgggatgctagagagataaggatgaatctaggaggagctagagaactggagggcagaaatgatcacaacacattggaattttcaaagatctacttacttaaaaatgaccagatctttttgtttggttagttgattggttttgttttgttttgctttgctttgctttgctttgctttgctttgctttgctttgctttgctttgctttgctttgctttgctttgttttgttttgttttgttttgttttgaagatggggtttctctgggtaactgctctggttgtcctggaactctgtaaatcacgctggcctcgaactcagagatctgcctgcttctgccttcctagtgctgggattaaatgctgtgctggctccacataactagagcttaagaagagtagaacaaaccagaattttttaaaaaagaaaagcttagagtaatcacaattcaaaaatttcaaaatctggaaattctaaattcacaaatttaaaatttttataaaatatggaaagaataaatatgaagaaaactgtaatagagtatatttgactgatttgctataagtcagtataaagtaatgtcaatagtagccaggagtcactatatattcccattgtctatgaagagtaagaacatatacactgtcaaaacccacatgaactaaaatgtagagtttaaagcattaaaagaaattaagactgcctttctagactgttgtgtgcacagtgaagatatctctccatattgaagctgaaaagagattctttcaaatgagcaaaaactgagcaaagtcactgccagcagatttgtgtttaaaaagaaaaagagaaacagaagaaggaagggaatggagggagaatcaaaccacattaaaggacgttcttctgccagaaagaaaacagaaacttgaattggcttgcatgaccgaagagcaataggaaatgtgggtaagatgaacatggggtttgagatcaacgctaaacaattaagtggcaagcacagaaatgcaattaatttatgcagacatgctaactcttgagatgcagatcaagaatgagaacactcttctttgccattaacatctttttataacctcttgaaatcttttttaagtttatttttttatctaacgtatgagtgctctgctacatggacacctgtagacagaagagggcatcagatccctttataggtgattgtgagccaccaccatgtgggtgatgggaattgaagtcagaaccgctggaagagcagccagtgttcataactgcttagccatctctccacctcccttctttaccacttttaaataaaattatttttcttttcccaaataaaaatagtggcaacaaccagcaacaacaaccacgcagactctgtatctctctctctctctctctctctctctctctctctctctctctctctcaccctcttcctcaactgcttgcctctgtgtaacacgtataaatgataaatacattcatggtttctcttgagtgtctagctctctgtgctgatggtttgaaaggtcctaaagccaagtcctttcctccctgggtataattagcatgtaatgccttcaaattttaacaagaggtgacaaactttcaaactgccataaggcacatgaataccaggagggtgggcggtcaggcagaggctatgccaaagccaacactgccatttgtctaagagagagcagaatgtcagctgtatttataaacattgctgttgttatgaagactcaatctaggaccttgtgagggctagacaagtgctcacaaactattaaactacatcttcagccaatggttttcttttgagaaaggaagttgtaatttagttcaggctagcccatgtaggtgagactgaccttgaactttcaatcctcttgcctctgctgtctgagtctgagattacgggcatgtgcctgtgtgcccaaatagatattgtttgagataagattcccatgcattataatcactcgaggttttgtacagtttaactcactttcatgtctactttgccatctcagaatatctgaggaggggaaagaacattacagtccctcggttgatttcaacttagaaagtcttggcctctaactcatgacactgctctcttcaccacttctggatctttcagaccctgtcaatcaacagaagccttcagatcttacccgaaatcaattccttggaaaagatttattctttcatggaatttttttatgcaatatatttgatcatgtttcccctcccccaattcctccaagatcctacccacccaacattatgttctttttctctttcttttcaaaacacacagagtgagagagagggagagagggagagagagagaaaacaaagcaaaatgaaacaaaagagcccacagaaaatccaaactacttctaagtatagggaatggcccaaagtgtggttgatacactaagagtcttgccattgagaaagttgattttccttttgtcagtgggtatcagctgcaaacagcttcttggttagtgccacaggctctgtaagttaatatgtgaatcagtcctgttgtctggaagatactgtttccttggggctctccatcacctctctccttcacaatctttctgcctcctctttcacataccctgcaccttgaggggagagtttggtgaaggcatcccattgaggactgagtgctccaaagtctctccctctccacacatggttcagctgtagatctctgttaattccccactaccactaggagaagattctctgatgtgggttgagcaaggcacagttcaatgggtactggcggtatattgctatgaattataatattaagttttcccctaagcccaagacctatccagtctcaggttcttagccactttaatggtctcaggtgtggattctatctcgtggagtagaccttacatccattttgaaggcagttggttactctcataacattgtgccgctattgtagcagactatcttgcaggcaggtcactgtaatgggttgcagaatttgtgatattgatttgtgatttgtgtaatgggttgcagatttgtgattctcttccaatagtatacagaatcctatccaatatcatgaattggaatcagtatgagaagagcttctagtaggtgtcagtgtggcttcttccttggagaaggtttatacctcataggtctgtactcttgttcaaagaagtggcacagcgataactctatagttacaattatgtcttactaattataatacacattttcttcttaaaatttttataatccttataaatatttagtcggggcatagctttccagcaggggcttcagctggtggcccgtggtctggcaggtggctgggccgctgtcctcttctcgatggtggcagtagggaagccgcgaggtagcggggatgcagactggcgcaccaccgagccactggcctggacaagagcgtgaccccggaacagtgtctgggactctaactgggacaggagagaaccactgtcactcattaacctgaagaaaaggaacgtggaatctggagaaggtgaactggcatgcaggctggaccactataaggcaagggctacaaggcacatacgtattcctcatccagcattcacagtaccatgtggatagctcactggaaaaggatcgcaccctgaccccattaggtcgggaacagactgaactcacggggctcctccgacttgcaagcctgggattaaagtttaataaaattgtccattcctctatgacccgtgcagtagagaccacagacatcagtcagcacctgccaggtgtcttgagagtcagtacagacttgcttgctacgggaagatgcccccattgaaccggatccacctgtctctcactgcaagccagaggctgtgtattacgaagatggagcctggattgagactgccttcaagaactacctccaccaagctgatgccaagcaggagcttggctccgcctgtccctcaacaatggcattatcaccctcctgctgattcgacccaatggtcttgttgcactcagtacccttggggacacagggttcatgcccccagacaagattactcggtcctgaggctgcctgtttgactgcaccctgtcctctgctggtggcccggctacaaccttccctcatcttccacagctgtgttgtggcttcatgctgttgccagaagaggatatctcaaatgtcacattggggtgcttatttctgactcaggctgaagtaggcaacttaggagttaaatggcctttttgaaagctttctgctttacagttaccaccagcacagtcctgtgaggtgtgacaggagccttcctaggcagaaggcaggcttgtcatggacattgtactagcctggctgtactgtattacatgattacagtagatgaacagagcaatcataacctctgacagagacctgtcaggtagtatggtggttgtttaccggggattatttcatacactgcaatctaggaactttgattgcttatttatcaaagattttcctcatgtgggttcttgctttaaaacccaacttctcaactcagttaagagatcctgtgtctatatctgggtcctttccgcaaaatcttgctagtgtatgcaatggtgtcagcgtttggaggctgattatgggatggatccccgggtatggcagtctctagatggtccatcctttcatctcagctccaaactttgtctctgtaactccttccatggatgttttgttcccaattctaagaaggggcaaagtagccacactttggtcttcgttcttcttgagtttcatagctgtctcttgtgaggctatgctgtggactagcaaacacagaagtggatactcacagtcagctattggatggatcacagggcccctaatggaggagctagagaaagtacccaaggagctaaagaggtctgcaaccctataggtggaacaacaatatgaactaaccagtacccccagagctagtgtctctagctgcatatgtagcagaagatggtctagtcggccatcattggaaagagaggcccattggtcttgcaaactttatatgcctcggtacaggggaacaccagggccaagaagtgaggggaggggggcagagggtatgacaaaagccatgaaagaagtggcactgcaaaaagactgtggcctgtatgaggcaagtaggtgacagtcctgtaagaggttctttgaaggcaaagatacagcccccactgactgaccagaggaggtggtggtggcatatgtttggaattctagcatttgtgtgtgtgtggggggggggggggtgacagaagcgggatcctaagtttctagccagcctgagttatgttgaaagacccagaaaattatccctgacagtgcctgccatcttagtctgctactggctactgttaacttcggacttgtaggctatttagaaatgacgtcttcattccaggtattctgataacttaagaaaaaaactggcttttgtgtatgtggtctttgtttttgctttttgagacagaatcttaactgtcacccaggctggctttgtaaaaccccccgaagctgggcctccgctcaagtcctgggatgagctggccagcaccccaatgacccgagagaaaaccacacctgatgcaaactgcaagagattttattatcagctagctgaggacgaactcctcgcactgtgcagtaactgttactcctcgcactgagctgtaacagtagggggcttttaacagctagctgaggaattgggaggagttgggaggagagttgagaggagttgggaagagttgggaggagttgggaggggttgggaggggttgggaggagttgggaggagttgggaggagttggcaggagagctcttctctgccgggatgtccttggtaaaattacaatgatcgctgtaaggctcaaaaacaaaaaggctttttgctggctatagagaacaaagagcttctttctggctgtatttttagagatcagggaaaacaagcttggggaacgtccagggactttaccttccagggagaaatgctctaagtcggggtctcacagcttcaaatttgagacttttctcagtcttgtaaatgttgggattgcaggtatatactaccatacctgaaccccccacacacacaaaaaaaccaccccagtaagtttctgtgaagtggttgtgagcatcttctgtaaccaatgcaatgaactggaatatttgatatctctctgacctttttggaaataagtatgtaataaaagtattttacttaaaaaaaatattttgttggtaagtattctagaagaccccattcctagtttacgaaggaccagacccaaggagcatgaggccaaagaaacagaaatagagattaaagagtgcacttgtctgggagaattagtaattgaagttcggtcctgtatggcagcaagaccacttaaacctccataacttggattagaaatatggacatgtttgtgggttaggacaaaagggatttccttcttgttagactatacctgggttatcataagataatatcttagacttgggtatatccccagagacagagtgggatgctttgaaattagaattacccacataggctcatatatttgagtgtttggtttccagttgatgaattatttaggaagggttaggcggtatagcatgattggaggaggcatgtaggggtgaacattgaggtttcagaagcccaagcttgacccagtctccccacccaccccccccccccgcaccctcttcttgtagagcagatttaagctctcaactacttctccaacaccatgcctgcctgcctgcttgctgccatgctcctcatcataatgaattcactctcggaaactataaacaagccccatattaaatgctttcttttgtaaattaaccttggtcatggtgcctcttcacaacaacagaaaagtgactaagacacagagtcacagagttgtaaagctacacaagagcaccctaatggattccgtctgtacatactgagaagctatgcagaagaaacgagcttatataagccaaggtcagccatattggttatgagtcaaggtgctggcacaaccttgtttgaggctgaacccgtaagtcctaaagtacatcattcaaaattctacaccttaatgtaaataactaagaaaaaccaatttaataataataaaaaagttacactcaagaaaaaaaatgaaaattgatatttctagtgacctgaaaacctaaaccacaaattgtgaaagaacagctcattccctgatggctccaaactggaaactttccacaagtcaaatctattgatcttttgcttctaagggttaaaaatcataaaaaataattaagtctcaaatggaaacgctgtctcagagacatacttgaattcagagtggtcaaaggctccatttaagttgcagtgttatgctttacaatgtagctatcgcctgaggtttttatattattggtaaataattcaacaatagcaacaacaataacaacaaaaaaagcaaagtgcaggtttaaaaatttgttcttatttgcaagtagtctctatgcaaatcatcccaagctgtttgcatgcatgctctctcttggtctgcagtcttgatctgaaatcccataacgagtgcacagcttgccacatcacactgaaattgcacaataaaatatctctaccattaagaatgtcagcccgcaaaacaaaaaccagacaaacgataaatatcacactgagattaccctaacactgtccaatccacagcttcataatatccacatgagttatgtgtaccagtcccttttctcttggctgccaatactttctacgttcatatagactcatttaaaatactggttgatagattggcacagccctgaatacacagaaaggccttttggggtgcagctcttataaccaataaatctgatatagaatcacagaatattatcagcttctttgccaagagataatgatatgtcaagtgtgtgagaaatttgttgtgcctggactacatagtcttagctatgccaaagaatgtccctagacttggtcatgtgcattcacctgcatttcacattctttgacattgcagtgggtggcttggagcactggtcaacttatgtgcgtgtgcgcacgcacacatacacacacacacactcacactatgtacttgaaatggttgaaattgttgtatgagccaagaatatgacacctcaatgaatatttatgtgacttatttgagatagctattctgagaacctgcagacataatgttacttttgaaaagctatctttaagctaggaagacagctcagttgacaatttgctatggaaacatgagcacctgagttcagttcccagaacccacattaaaaattaaaaaaaaaaaaaaaaaagaaagaaagaaagaaaaaaggaagccgggcttggtggcgcacacctttaatcccagcacttgggaggcagaggcaggcggatttctgagttcgaggccagcctggtctacagagtgtgttccaggatagccacagctacccagagaaaccctgtctctggggtggggggagggaggaagtacttgttagtcagctctggggaggtagagaaaagtgggtccctaagactcactggctatctagcctagcctactggccaattccaggccaatgaaaggccctgtgcttatctaaacacacacacacaccacacacacacacacacacacacacacacacagagagagagagagagagagagagggagagagagagagagagagagaaagagagagagagagagctgttcatttgtaaaagaaatttgcctctacgtacattagtggaacaacagtagattcaagcaaagacttactcttgaggccccccctaactgcctagcgtctcacaagattagagatcacatctggtccaaatacagatcattacccactaccagctactctgtaagctgctaacttgagacatctcctatgttaggagacaccttccctcaccttcccataacatctgaccttatccctccaacccttcatctgtggcttcctaatttttgcaggttagtgaatttgtatgctttccccttgttagacttcctcctgccaatttattttatagatgagaacttctgccccttcagaaagaacacaaacttcatggcttctctgtgtaggaaacattaaatatgagttcttttctatcaaatactacaaaacttgtatttaaaacacaagacacaaatgtctccgttactattccactgctgtgataaggtaccatgtccaaggcaatctataaaagaaaactttatttggggcttaaagtttcacagggttagaattaaccctgtggccaagagcttggcagcaggcatgcgggcatggaggttgagcagtggctgagaacttacatcgtgagacccaaccaccagggagagagagagagagagagtgagagagagagagagagagagcctcaaagcctgtcctcttgacacacctcctccagtgtggccacacttcctgatccatcagaaacaacgacactaacctgggaaccaatcattcaaacaggtggcacatggggcccttatcattcaaaccatcataacaaggaattcaaatctttttgtttttctctcccccaatgtataagacttttgtgcagatgtttcatgctcccccttcaccccctcacccctgcaaagacctttgtttacacaggctctgctctgttccaggattaaagtgattagcccctttccccttcattttcttcgcactaattcttttaaaactgaccaatctcaaaagaatgtgaggtcagattccagccaaatgcggaaaagacacagtcaccaccttcattagaaataaaatccaaagcaaccctgtgtgcttactcttttgtgagcagtataccctcttgatcaaaaaaaagttgttttgtctcatggagatacttcaattgggaaggtaatctcgtgtgtgtgtgtgtgtgtgtgtgtgtgtatccccaaacttacttctaaatgcctatcttccataagaaataagacattaaaatactgcttttactatatgataaggacatttcagtgaagcaagcctaggtgcgagattaatctaaccgcacagacctttgctatttggaacatagagacaagtcagctacctctactagcaaagccagatttccttcccctagagctggcacaaaaacaagaggaccattttaaactgtagcctattctgcaaaatttacagatcaatccacgtcattttccatttatttctgtttctgcattttatgtacaagatgcagacatttgagaaatataaaccttgcccccccacacacacttccataccaccaccacctatcagtttaaactcagaaacacaaaggcaaaaaggtttgtgtgaccattatgaatttttaactcaggactcatgggtttagatggccctgaattagtgctcccaagaaggcagggaagataagctgaatgtaagacaagagatttaaaagctcttgatatatattttgagcctcgaggtacaacatatttgtagttctggtcacttcaaatatttgggaccaaggggctgtgaccaaagttcaaactccaagtgttactgggccagtgcatcaagcgccttgcctctgggagttccaataagctaggctcggccaactctccccagcacagcaagtactcgagaatagtaatggagaaaaaagatgtagtcaatgtggctaccttggaaaagggaaccgataaaggggttcagcaaaccccaaccccatctttgagacactaacatgagcctcatgaagacattggttcttcagggtgagatgaagaactccttatccttagagggactcagtcaggttcccagaaggtggttagtcctgctctggagtgagcgtcactgtggtcgataactaccctactttatgagggtaatttgttttgtgaagacagcgatgactctggttattttcaaccccttggactggaatgagacattatgtgagggcagaacaaactgccctcaagctggaaccaggagacggaggcagcaatccattattgtggccactgtcctggagaaggctcacaaggaacgagttgacaagttagtgtcccctatgactcagtcttagggcaacttattttatagtcataagtgagagattatatctggtgtgttcagtaagttcatggacctggcttttctgatatgtgttgccagtgtaaaaggggtggtttttggtttgtttgtttgtttgtttgtttgtttgtatggcttgtgtaaataagttagcagcctatgcctcatgattcattctggaggcaactagttttttttgttgttgttgttgttgttgttttctgtggggttttttgttttggtttggtttgcttttggtttttgcccaatccggatgcacagtcaccttacctctgcatttgcaaagtggggccagagcaaggcacagcccaaagcaactgtctcaaagtatgggacaacttagtacaggacagcctcttagaacagggcacagctttgtctccgggcctgtctcattaagagaaaaatcataatatgagatctggatgtagacactgtatctttgttgtttcaagagatacagatgcctgcctgcgcattaggaagcactcctcacgacgtatttattggagttcaacagaccacgcagttttcaaattagacaagagagcagagggtatgcaaacaggaggtggattttagagtaaccaagaccctgtacactaagagtaaaagtagatgaatccaaccctgagctgcagaaggacctttgtatctcgtctacacgagactataaatgtacacagcaaaagaacttgtaagttagattgtgattgaattccaatgtctgtgatcatttctcattctgatgcttcgcttgttagcaaaatcagtctgtgttatgatcatcagtacattaaatttccccacaaataggttatttattttcatcgtatgctaagatagctggcaccccccccattctcctagaagatttattggacatattttatggttactaagacagctgctcttaagtgtataatttgtattagtctgggtatacatgatgggtgtgagtaaaagagacagacagacaaaaacagattagaggcgagcagacagacacactaagaaagaataacttgttcagattcaagacgcatataagctttttttaaatattttttattacatattttcctcaattacatttccaatgctatcccaaaagtcccccataccctccctgcccccccacttccctacccacccattcccatttttttgaccctggcgttcccctgtactggggcatatacagtttgcgtgtccaatgggcctctctttccagtgatggccgactaggccatcttttgatacagcatataagcttttgtgtttgagaaaagaaagactttaagaaacaggaattatgggtctggagagatggatcagtagttaagagcactggctgctcttgcaaaggacccgggtccagtgcccaacacccacatggcagctcacaaccctctgtaactctagttccaggggatccaatacattgttcaggcttctacaggctcctgcatgtacaccatatatacatggtgtacataaactcatagtcacatacatataatattctctctccctccaggaaagcatataaacactatttgagttttaattgaaaaatatattaaattttatgtatatgctatttctgctcctcacctgctagaaaccatttcaattttattctaacttcctatttaatttgatacatattatttactttttttttaaatcttattttgtattattattagtagtagtattttgagacaaatctctatgtaccccaggctgggctgaaactcacaactgccctgcccccaacttcctgagtatcagaatcctaagtgtaccctgccaaacctggcctgtttctctcctttggataatgccaagtgccctaatttacagtcagtgaaagatgcagtttaggttcctatttacctgcaagcagtgggcaatcttatatattaaaaaaaaaaaaaaagtatactctcaaaatgtttgccccaggacagctccgtaagaccacctttggagtcacgaaactcaatctcatttcataatacccaacaggtgcgcgtattatcccttgttttctttcggcgtggcctcatttttacacagggattttaatagaacgagttgttctcctatcgctttaactccagaatcctggatctgcagcaataagcttttaatcagcccagttaaggggatgtaactccaagtgaaatgaatttatgggatctgatttttttcttttctttttttctttaataataaagatcacattgttgtaaggaacacacaaataaaaataccacacagctaaattaaggtggccactcaaacaataaatctcctagtcttaaggcaacattggacttcatggtcaaatactcagaggttgagaaggggttaaaaatctacctctttcactgacctaccctctatatttaacaaaaatttttaatccttttacaaacttggcctgtgggttttttgattaagcaagttaccaatatttttttcaagtactgcccagagaaacagttcaatgaaagcctagataaaaaagagaaggaggaggaggagggagaggaagaggaaaagaaaaaagaagaaataaagattgtagagaaataacctagcaatctatattaatctattatttgtaggtaaggtagtaactgttgtgtgatttccaatattcaaggggcaaaaccagacacagaggaaaacaattaactggacatatcattgtcttttgcaaagtaggttgcaaccctgggcataacttttctatgcaggattatggtcaagttatcagtatacaaagagaggaagtaaaaaagtggaatgcctagatgaagaatcctactgagatacttgaagatgctttttcatttatgaaaagtcccaaacaggaacgttgggggatgtcatacgttcaattttcatgtccaacaaagatggcttatggttctgagaaagcattctaccagttaccaccatactgccatagacctggccttctcatgaacatactatagggacacaccctgtgccttttcagtgagcaagtgaagtgtcacgttggacaaagtatgtcattctactgccagtccagagatgaggtacgaggattcgtttctacatttgaatcacattcccagttcttatgtcacgggaagagaaatcatgacagtggcattgtttgtttgtgttgtgaagggtcactatgcttctgagaaggtagtctttgaaattaaggtgagtaatcttaaaaggccgatgatgggaactctaactgtgaggctgtcatttccttaggaagctcatcgagactcatctgaagaccatacccagtcttgcattttcgagtctgcccaatatttccaggatgtaagtaattatttgaacattcagagaaatttgccgttaaaacacacttctacatcaatgtgttctgtcaagaacaagcaattggtagtgtccttgcctaagtcaatgacatctgcatttttatgtatttggaaattttatttatatagtacttaccttattagttacatcttgattttctgacccttataggaccctttgaatctaatacatgtttaaatctgtgaggtcgtgtcaagcatgtgtattttagcatattgtgggatgtgctgagaatccacacataggtatgcatctcttccttacccagccagtctagattgatggattcactttcaccagtaatacagtgcaaacactgacattttgtcacaaacgaagccaaatcgtttcagattcctctcacttaaaaacgagctaaaaagcattctaagccttaaaaataaaaatgcagtatgcagacagatgaaaagaggcatttccccattattctataacagccactgcctgtgcatgggtttgtatggattagtgattggctctgagtcaccaacgaggtgttggtgtcccattaaggaaagaaatgaaaatgtgtcctccttagaaccatttcactaagagcaagtccagacatcaactctctagttcatgttccctgtgtcttccagcctctgtgtgtctgttgtttgaatctgcatctgtgactgcttagaggctatcttgtgagtctgtctgtctgcctgtctgtctctgtctctcccctcctccttgtgtgtgtttgtgtgtgtgtgtgttctctgttgtgtggctgtgtgtatctgtctgtggccgtatgtatctctcctcccacaaagagctttgctttgctctgcatttattagagagcttagaagtcatcacacaaggaagacatgggacactttacaaaaatctttaccagagtttggcaaggatcgaatcaccaaccaacgctagctaatcccagcagacccagacaacaaacagttctacaaaaataattgtttatcaaccaatatgcataaatggatgcttttaactttcatagtaggttttaggaagttgctttctacttctgtgcttgatactttcagcaaatgatgcacatgtgttatcctgggtggaggcataatttaagttataacaagcctggaggctagtgaaaccagaactttggttcagtgaggtgggcagaatgaatgaacgtcatctctgagattcagtagggagcgtgggacaaaggctgtgagaggaacatagggaagtaagttgtcagcctttggcatgactcttgctccactttcatccatgacaaattctgtaaggtcctcaaacaataagccgatcctataaaatgtgttctgagattgtgtttggatcaagacaatttacatattgttgcttagtcacaaaggacaaatggctgggaaacctgagaaaccaaaggctgtttgtttatagaataaatacttccaaacagacagcacaggggcacgagaatagtcacacacaaccgtgccaaaaaggatacccagaatctaacaattatggctcctcttatgaagaatatcattcagatataatcgccagggaagcttttgaaaaatataagtacttggccctcataaccgtgaatcagtgatcctaggatgggtcttgaacatgtatgtgtccaggttgttcaattctatgttcagggctcatttattttcccagatagcatagtcgtgcctcgcaggaggcgggtcattgaatctgtgtgtattgttctcattataagaaagactctgataaaaccatctgaaagaagatcagttacatacagattcacaactgctcctgtaaagaggcgtctctgttcttccctctttcagtacctaaaacttttatttgcatgatattttgcttaatgatttcaagacaaatcctgacttttctgtttcattcaaaatcaagaaggcgggtcttaagagagaactgggtctgcatggtttaaatgtactagtgattaactctgggttaccaataatgcattgtgtcacattaaagaaagaaacaaaagcatgcccccttgaagccatgtaactaagactctaaatttgaagtgtctactttgttctcctgtggtttctgtcctctgtctgttgtatgagtcttaatctgtgatctgtgtctccctgaggactgtctgcattatctggtgaatctgtctctgtccctgttcctgcccctgtccctcctgtccctcctgttccctgttcctggcccccaccgccccacccctgtctaccctgccctctgtcccctgtcttgtccctgtgccagtcctcatgtccccttcccccgatcccacctgcccctttccctattcctgctcccctgtccctgtgcaccccccccccgctttctctcctctgtgtgtgtgtgtgtgtgtgtgtgtgtgtgtgtgtgtatctcaattgtgtgtctgttcctcacaaaaggcttcaccctgtctttattaaaagcacagaaagcatcacatgagaaggaaagggagactttacaaaaatctctaacagagttttacaggaattatgtccgtggctgcaacagatcccaacagacccagataacaagcgttgcttatcaaacaatacttataaacagacgctttcaacctttatggtagattttagaaaacggcctttaacttctgtatttgctgctctccacaaatgatacgcatgcgttgttaagggacgggggcagggaagactacataattgaaggttgcagctaagcattagcgtaggttgtgaaagctgattacatgggaattccaaggcaagtgaggttggctgttacattgtcctcttaaaagcaggtaaaacaaacaggctgagtgcacagaaggctagcagtcttaagtgactttgtgaagtcctgcaaaaggcccagtgtctcagaatgtaacagatagtttcagaatatttcatcatcacgacagccaacaccctctggaatgccctgctacagaaacgtgatttttctcttcaacactttggaaattacatcttattcccatgcttcctgccctcctttaaaaatgcttcttattcacgctaatgttcttttctgatgcattctggctttgctattttgagtaatacatctattcatctattcatttgtatattcgctgagcatggatttcctgagtcggcttaatgcaaaaaactgtacaagccatgcataattcaatggtccaaagcagaaacaacactccacaacagacgacttatggtctaatgacatggtgtaaatcaaatgcaaaccaattagttagaaaggtgcaccatgattatccataaaaggaacactcgtggtgctttgaagttgtactgtgggaattttaaccttttcaggaagctgtagaggaataaaacaaagtattggggaattttaggcatactgggatcctaaaaaaattatatagttaggtggtttgtgtatggcctattatttgaaaaggccccaataaagaagctatacaaaaagcagtctgttttaaagccatgagtggtggcacacatataaatcccagaactctggaaatggaaatagatggatatttggagatagctggccaggcagcctagtctacttagttatcccaggctaatgatagactttttctgtaaaatcaatgtgaatggcatctgagttatgacagtcaaggtttcttctaacctacacacactacacacacatacaccacacactcacctgcatacacatgagcatagacatgcatgtacataagaagtagtatgcttttatcccagatacttacacaccaatgctaactgtagcactttgcacaccactgaaattatgaagccaatctaggtgtccatcaacaggaatggataagaaaatatggtttatagacacagtggaattttattttagccataaaaaaaatgtaatgttaacgcaactgcagatcattgtactaactgacttaaggcaacctcagagagacatatactgtaagtattctctcacatgtgagttctagcctttatggatctataaagtcaagtcatatgaacacagattgcctgagaatagaagcaatgctgttgaggtgaacagagaggaatgatgggaaatgggtggaccaggagaagagggaacaagggaatgtgggtggggggctgggagggggagatgcttaaagcacattacatcatggcattatcataaaccaatatggtgaaataaaagggagctttgggagttcattgctaactttctactttgtcttatcttttataatgttcagctatttatctatagatgcaactctgcagcggctggaaccacattctttctacaatttgagtaaaatgactcacatgtaagtataagaaaaagtacaaaatagacccaaatgacagcctccatttaaaatattttttacattacttttctgtggtgtgggatgtgccacaatatgtatgtgtaggtcagaagacaacgtgtggaagtctattctttcttttcaccccgtgggcttggggactgaacttgggtcaacagatgccctcagagtctgagccatcacaccagacccataaagacattttttaaggatttgtcagggttagactcaaagtaaaagaactattaaaaggaatgtttggaaacaaaaagattgcccccaccccaatttggccatacattctgtacagaaaaaaattaacggcagcagaggaggtaaatgtgaaggtagatataaagaaatttggactatataaaacaaaaactgtaggatttaaagtacaggcaacccaggtcctgcacaatagcctggcatcttaaaaacatacagactgaatctgggtaaaaacaaaacaaaataaagcaaacaaacaatcaaaaaacactattcaactatcaataagaaaagtttgaatactttgtgacatttaaaatcattgtcaaaatattacatttttctctcactgttctaaacatataaagaaagacgagatactaaatctaatgttgtttgaatgcatgattttaagcatcaaaatatttagaatgacagtctattttaggtttataaagccatactaagaagttcaaaccgcaatcacccatttttggctttgttgtatgagttattggaaagcatctttccagtgtcttggcaaattctaggcctggatgctggtgttcaaccctctttcttatgatgcaataaacaatctgcaagaatttcttctgttcttgaggagactggggcaggttgggaggtttttgatgattgttctggtttggtttggtttggtttggtttggtttggtttggtttggtttggtttggtttaggattctgagaccaagtctcatcctatagctcaaacaagctcacagcaatcctcctgcctcattctctttaatgttgagagtacaggcataagacacccatgccttgttttgaggtagaaagggaggttgaaatagggtctcactgtgtaatccaagttggtcaagaatttactctgcactacaggctggccttgaacatgtgctttctgtgctggggttacagccacacaccaccaagacaactaagccctgcaccttcatctttgtccatcaatccactgtttcgggtaactcatgtcataccaatccgttactcagaagctcatgagcaacatcgtattctttattgtttgtgagtaaacaattgtgacaattaccagtgactgaaatggtgatgtaattgatcacctactatatgattcccattgaagaattaaaaaaaaaaaatactgactgccctgagaacatgggccccggccagatggcctaatttcccggaacttttgggaaaaacaaccagagaatgtttcaatgtcccaggtgccttgaagtaaatatctgcccctagactttttttttatttttttttttctgatcctccccctaggttgtggtttttgcctttataagcctgctggaaaatagggtcagggtcggactcctctacccctgtgtggtgtataggtctcgacctcagcatgctgatttgtgtgccattaaaacctcgtgtgtttgcagcaagcttaactgttgtggctttctgggctcgagattcctgagactagagtgagggtctccctttaggggtccttcaccatctgttatctatccaatgatatgtatgcaacatacgtagcagtaaagcttgcatttcactcgttattcagctaacattctatgataactgcatttgaaacacttaataaagctggttacttaactagatcaaaataactgatctgcatccagataagcacaatgcaaaacaaggaatgcctctatacatagaattaaaatacatgatatcaaaaagaggatggagaggttgtgaataatgtaatatcaaaaggttctcgagtcttcagattatctaagtggttgtcttagttgcttctctgttgctgtaataatcataacaactaaccaaaatcagctcagggaagaatagcatttatttggcttataggttacagtccatccctgagggaggcccaggcaggaacctagagacagaaacagaaaccacaggggaaccccgcttattaactcactcaccatagttttcttacatagcccacacccacctgcctagggaagaaggcactcttcacagggcctgagcctaacctccagttaagaagatgcccccagagatgcccacaggcaagcctgatagagacaattcctcaactgagattccttcttcccagatatggctagactggtgtcaagttaacaaaaactagccagcacaatgttaaaacttaatatcagacttttataagtcatgaatcgagttataatccatgggaaagtgattcaaatagttgtagaagaatgaataactaacaagctaatagttgagagggatgaaagtattaactaaagaaggtttaataaggcaagaaatgaaaaggaataatagcctgaccaaatagtaaattcaatcccaaataatcactgcattacacataaaatgataataataacagaaccgatgcaattctaattaaaatacaaagatttccatactgaacaatctttaaaagtctacttgactattgcttgcaagaggcctatttaagtgcagtctggaagggttgagagttggtctatgggactgaatgactcaggtgagaacaaaggttaacaaggaaggaaatcgaaggctaggaagctgttgagtaacataggctctgagccttcaactcccatctcatgcccaccttggggctcctctcctctgctgctctcccatagtgaagtacttgaggatgtgtgtctgacaaagggccttagcaagcactttctttgttccttgtgttgcttagagaggaggggaggggaggggaagagaggggagggggaagggaaggggagggaagggaaggggagggaaggggaggggaggggaggggaggggaggggaggggaggggagggaagggaagggaagggaagggaagggaagggaaggggaaagggaaaagggaaggagaaaaggaagggaagggaaggagaaatggaaagggaaggagaaatggaaaggggaaggggaaggaaagtttgactgaaaggagaaagttgatataaaccacaaatgtccaaatgctactgttgtcaaagacaattatgtgtgttctaaaactgggttgttatgatggtcaattcagtagctttactaaaaattaatgaaccatgtgcctacgatgtgtgaattttgtggaatgcaaattatccttgaataaagactctttaaaattacaaagatcagattttaagctttccaattagtagcatgtgcccttggtggccaagactcagaggctatctacggaaagaaaggctacagacctcagtgggttcttaatgactttgcacataagtataggaagtgctgtgaatgtcttctagccaatctatgcatgctaaatacttttaacttaactagtgccagcccatggctcacggttgtcactaataaactacacgtgactaatgttaactgcgtgttttgatcagtgaatacatgaacctaataatataagttataaactcatgtgatatcacaacacatatactaaagccttcagttactggcatcatgaaataaacccaagtgagccatttaggcttactctgtcccttgtacctgcaattgtaattaacagactcttggccctttttgcaatgctgtcatctatcaggattcactaacctctcattccagtgctcgtttgtcatagcaacactgctggctcctgtaaaaatacagatgcctgccctctggccccagctcctcgccaaaccactggagggtttttctttctaccaaaatctaaaaagaaagtggggaagagaagaaaggaacaaaaagagcaaacaaaatgttgagacttcagatcagaggaagggagtccataaattcaaatggactgagagcaagcccctgtctgcaagagaggcaatcgtgtctgggaggagctggggatctgtagttagcgacatgaagtccctgtcctaccacataagtacatcagcgtctttttgtgtacttttgttaatcgtgatttctctttagtgaaaacaggaagggatgaagtttgatgagctcttgtaactcttacagagaaatccggaacaccagaagcttaacctatatagaccctgatgccttgacagagctccccttgctcaagtttctgtaagtactgactccttctttattatgggtgtgtgtgtgtgtgtctgtgtgtgtgtgtgtgtgtgtctgtgtgtgtgtgtgtatgtgtgtgtgtctgtgtgtctgtgtgtctgtgtgtctgtgtgtgtgtgtctgtgtgtgtgtgtgtgtgtctgtgtgtgtctgtgtgtgtgtctgtgtgtgtgtgtctgtgtgtctgtgtgtgtgtctgtgtgtctgtgtctgtgtctgtgtctgtatctgtgtctgtgtctgtgtgtgtgtctgtgtgtgtctgtgtgtctgtgtgtctgtgtgtctgtgtgtgtgtgtctgtgtgtgtgtctgtgtgtgtgtgtctgtgtgtgtctgtgtgtgtgtgtctgtgtgtctgtgtctgtgtctgtgtctgtatctgtgtctgtgtctctgtgtgtgtgtgtatgtgtgtgtgtctgtgtgtctgtgtgtgtgtgtgtgtgtctgtgtgtgtgtgtctgtgtgtctgtgtgtgtgtctgtgtgtctgtgtctgtgtctgtgtctgtgtctgtgtctgtatctgtctgtgtctgtgtgtgtgtgtgtgtatgtgtgtgtgtctgtgtgtctgtgtgttctttacacttgtgttgctggtgtctatccagaatctccctaagatgatattgtcttttgtcatcatttgactcgtgtatggcacaatcaggtcacttgtgacttcttgtgacttctcatccttcctcattgggcaaagcaccatatgaaaaggctcagatgcttaaagcctattccaaacatcagcacgtggctctgggaccagagaccttctccaagagacatgaggaagaaaacagtaaaatatatatgtagtctttaagtatggacaaaacaaaatcctgagaaccaattggtcaattttgtttgtaaataatatatgtatttacgttatttatattgtttatattatatttatttgtatttatattatttgtgtttatctttatttatgtttgtttatatttatattatttatttttatttttaattgttgacaaaagagtattagaaatctcagaaagcaaagcctcgaaggagaaggggcacacttccgcatggctttagtgatgacttatgagccatcaactccatcagagcagaggacattttgattctgttccatcctaacacacaatcggtagtacagaaaaaaattcctcagatgtctgtgcatatctgacccaaggtcctctggtcaccagctgcaagaaccttctctcctgcacaaatgcaattttaaaaattagaagaaaaaaaaaacagtataatgaagataaaagccaaccttaatcactgtgcctagaaatgatcacgattacctcttctttttttttaatatttttttattacgtattttcctcatttacatttccaatgctatcccgaaagtcccccataccctcccccccactcccctacccacccattcccattttttggccctggcgttcccctgtactggggcatataaagctattccagcttttaaaataaaggtatatcccacatatattctgtgaggcaaatctttaaggatggatacacgttattcaggaaggacagggacaatagtagaggggcaggcagagggacagggtaccacaataaagacagaagtgtggaaccacatggctcattaggggaaaactgtagcagcccagtgttgaaagggtgggagtgggagacgccaaagtaatggcgtgcatgcgtgattgaaaggtaccttgtgggacaaggctgtcaacccttttagggacttgctttccactcggcagatggtcaatcaggtaattagagggggcatcaaagaagaaagggactcatttagtgcttttaggagagtagcaaggtcacgatacaagtctcacgagccgtgcgtttctggacgccactcagctccccggcccttttgcccctactctttttccgtgaacccccagccactaaactcttgccatgtctcatagacacccagaggatgtcgcttctggattgtcccattgattcactgtgagttctctggctcgtgctgcctcttcgatccaatggcttcctctttagaaggactccaagactgaatttggttttagacatgtatcagtgaagcatggcgggggtatagcggggtgtactagaagagctggtaggatctaaatctgtcccccgccaagacaggcctttcaaacttgctctgttagaaacataaatcctggcagcattaggagcatccaaacttttgtgttcacgttatattttgaacatctttgaggcttgacatatttttcccttgatggcatgaattttgaaaagagaagctgttttctttctaattttccttcctttctgggcatgtttttttaaatgccactgctgtatactcacgggtcactactgcaaacaagacattcttagcaaaataataatgcaatatgaagcagatttcgggagtatgtggaggggacagggtctctctacatggccctagctgatagccctaactctcctagaactcaccatgtagaagaccagactaacaccaaactcattgagatcctcctgcctctgcctctggagtactgtatcgatggcataggtcaccatggcatatgtagagtttaaaacaggaaagctgacttagagttgggtagtcatatattttttcctccattggccttttacagcccatcccccagcgcacacctacagcattttccaattaaaacaggaaactctcttttgcttcctcctgcctcctcctccttcccttgtcacttcctgtcctgtttctaggactctcgctgagttcacataatccacagagaattctaagcagcacataggcaccaccagcattgattggattaagctattttgctttgaaggaatgtcattccgtactggtgttagcactcgccacagtcatgacattgagtggaggccttggaactcgtccttccagccattgcagtatacttcctaggtgttgattttctttcctgaaactttcgtttcttcttctttttcaatgtagtggcattttcaatactggacttagaatattccctgacttgaccaaaatttattccacggacatattctttatactgtaagtatactcaacatgcagtatttggtatattttgtctatgtatatgaaacatggcaagaattggggtacagtcatgggaactagcagaagccaggaaaagcaaacgtccaagagagagcagatttggggggaggcaggaagggggcagggtaattgtgctgaaggatggagcgagggatgagtgaaatgatggcctgtaacttggaactatagccaaataaaccatctcttccttcccagtgccttgtgcccacggaggccagaaaagggaatagaatgccttagaactggagttagaaaccactgtgagccgccatgtaggtgcagagagctgaacctgggtcctcttcaagagcagcaagagctctgaacatctctccactcccctcccctttgttgtcttttggtgacagaaatgaagttagaaaaactcaaaagaattggctttcttccctttctctaattcgcttccccctaattctttcttgaaccctgtcttagttaggattaatattgctgtcatgaaaactccataaccaaagaaacttacggaggaaagagtttattcagtgtatacttctacctcacagtacatcatcagaaagagtcaggacaggagctcagtaggagcaaggacctggaggcaggagctgagctgaggccatggaggggtgctgcttactggcttgctcctcatggcttgctcagcttgctttcttataaaactcacagttaattaactgtaagtcactggttattctggcaaaaaccattcttgtaagacaatgggaataggaacctaggttgaaatgggtttgtgctggctagttttatgtcaacttgacaaaagctaaagtcacctgagagaaagaaacctcaatttttaaaagttcctccctaaaaatcaggttttaggcaggtctacaaggcattttcttaattagtgattgatagggagtgcccagtccattgtgggtggggccatccctggactggtggtcccaggttctacaactcagtaagcttcgtccactcttatgtgacttagaattcagcccctgaaatggtgccagccatattcagggagggtcttaccacctcgattaatcaggacagttcctagactattttctttaacactttacatgaaatgttctatttatttagtgtatatgtgtctttatgtggccgtcagaagacaacattcaggggtagattctcagagtcaaactcgtgttgtcaggcctgagagcaaacacctttacccacagaactgagtcaaggctctgccaccgtcatttgatttttaaatgggaaaaaaatgatccaatgatttcccagggggatgactgaatggggaaggggactcctgctaacaaggatagctcactttccatattttctgatagcttttaactcttcctgccccactcaaccacctcttgaggtgtagagggaagttatcggtgtccttttcaacaaacagtgaagcaaaagaccagaaaattcaaatgagtgtgtgatccgagctacacagtgcagtcaagagccctgctttggattgactctgatgcctttttttttttccaaaagcatcagtcagaccagttgtcttacctaatcatacaaatgaaaaagtacggaaacaggagaattgcaaaggctgagttcacactgcagactcagcaaaatggagaatgatcagctgcaaacattttctttgtttgtttttcctaagacaggatttctctgtagccctggctgtcctggagcttgctgtatagaccaaactgggctccaactgagagatctacctgcctctgcctcaaaggcaccaccactacctagcatgctgcaaactcttaatatttttcccccctaggagggaaaacatgaccatgtctctttactacagataagctcgggttaaacataagccgtcctctgggagcaccaggttggcagtgttttgtaaatagaggacattctaatgatactcatgaaatgagatccattgatccctttcccctgatccttctattgacatagaaaattctagttgctatggacataatattacagattcagaagtctctcagctccatctgcttcaagataaggagtaaggcagagacctcagctcaccgtggagctcgtttgcttgattggatgctctattctgaatatgtatccatctagaacagctctcacccacctcatgtgattagaatcaccagcgctcaggatcgggtcaaagaaacagctaaaactgtgatgtgttgtggctggttccttgaagtgcatctatgtgcaacaagaatccatttccagagtgcttcttttctcaacagtttccatcgctttctcttgcagtgaaatcacagacaacccttacatgacttcggtccctgaaaacgcattccagggcctatgcaatgaaaccttgaccctgtgagtatccagtttcactcttgccagtacctgaattttatctgaggctattgtcatagttttcttccccccctcccctccccctccccccaccccgccccatctgctaaatatgtgtctgactttggaaggatgctaccttctaatgtatactctgaatctggaagggtttcatagaattgagtgttgccttgtactgtgatattctatggatcccaaacaggataagataataagaactgcatgttctcttatgataggggttggtgcatttgttctgagggccagattggttatccaagttatactggctcatagcaactgccactgcaaaacatagtcaaacacttacataagtcactgggcaagtctgcatcatcattgagtccctttatggaaacagagtgtgggtcagatgtaggctggaggctttgtgacacagcatcctacatacaaatatcccaaatctacagagcaggggttctcaacctgtgggtcgcaaccctttggggggtcaagtgactctttcataggagctgcatatcagatatttacattacaattcataacagtagcaaaactacagttatgaagtagcaacaaaaaataattttatggttggggtcaccacaaaatgaggaaaactgtattaaagagtcacagcaatagaaaggttgagaaccaccgctgtagaggaaaaagttccacagagtaaatgtgactgtcacagagtccctgaatatagagtagtaccactaagggcttttcatagtccccaagcacactttcacccagaaatcagaaactatgacagagctcctatgactgcttgttcaatagaaattagcaatagagttcatgaccttctctttggatgttcaaaagtagatactgtgggatgtatagtactgtgtaagtacagaacttgcctagcatgcatggagccgtgggttccatccccactaccctataaatggggcatagtagcacaggcctgtaatctcagcacttgggaggtagagacaggaggttctgaggttcaagctcaaccttggctttatgacaacttccagactcagtttcaaaacctagaaagcaatctaagtagatacaaaatcagggagagtcataaaatattctaatggagaagatctaatgggaatataaaagataagctaactcttcaagctggcagaaatctcttctctcattgtgatagtcacaaggtggattcagggccacctctgcagaccccttctctctagtttccatagcaccacccccactcaagactagaagggttttgttttgtttacctatatggtcaccgggattctctacctctggccacactacagcctagagttctttgctggatacaaattggattgacttagttcccagccaaattgacccaagcctccactcagtttttcccagggacctcctttccaagccactgcttaggtatccatttgggtcatgtgaaccatagctcttcttccccagtggagcaggtcacatatggttttccagacacaggtggacctcttgggcaagggcaagtggttgcaactcagccacctttccttttagcaagagtgggctctcagcctgctcagtccctaagttcaaggccatgcatgtcccctgtaaaggtttcctgcattaagtagcattcgtcccaagttagtccctccatcctcagcttctttgcagaatgttagcttccccttgttaatacttttgcccaggatctccattccctttcaaaagaaagttgtcctacgcctcctttggggaacagtggtgggatcctcaatgtagaggtgagaatggcatgagtttgtcaactgtctttccaggtgatttttttttaaattatagtcttataaaagccctttctttcttgaagattaatgaagctcaaaatgctaaacattcaaggaaaacacccaaccgcagagttcacgtctgtgtccccacttctttaatttctctgccatttacaaccttcaagacctgcttgtccatgaagtttttagtgtctaaaatataaatcaaaccaagaacgtgtgtgtgtgtgtgtgtgtgtgtgtatgtgtgtgtgtgtgtgtgtgtgtatttgtactctttagcgtaggtgtatgcatgcaggtttgtgtatgtacttgtggaggcttataggtagatatttttttttttctcaattattctccacttgtatttttggggacagggtctttggctgaacctgaagcacatcgatttggctaggctagatgctcaatgagcttcaagtacccgcctgtgtccaccccatgctcaggatgagagttccaggcatgcatatgctactctgcttgacttcttaagcgggtcttagggatccaaatgtcaggtcttcatgcttacatggctggcatttactacatgacccatctctcaagcccatcaaggaaaaagttggaggaaataaaaatgtgttaattttttcacatatttgcaaaagagttgcatttctggaaaagtgaatttattcactggtatttttccctgtctgtgtctaagtccctggaaaacagattgcaatccatacccatggttctttagaaattagaactaaattcgggcattttaaagacaaaacaaaagatgcacaaacaacaacaaaaccaacagattatttctcaatttcttacaattatctagaataaattcgaattttagaattgtccttcaacattgtcttcttttaagcattcatcattattagctatagtgcctctgtctccttagcaacttgtaatgaagtaatagcatcattatttctagagattaaataaacaggatgaaagaggatgtgacagtctcaggatcacccaggtattacgtggcagaactaggcctgattgcaaacttggagactcctctgtagttactggtttatcgagtgcacatgtcatagattacattattactgaagttctcccacgcctgtcccaaggaattccttaggaggaaatgcctgttgctctggtcatggctgttgtctctttatgtcaaaggccaccaataaccacatatcttagagttccaaacactggggtcccttctcctgcagaggtgcatggttttgataggtgagaagaattgtatttggggtcaaggatcctgatccctaataagtttagactaacaagttcttggcgagtcacttccaagtctcagtaactttactaggaaacgcaggtggtagcatttcaggctggctcctgggaatctaggtagaaaaaaattaattagctgcagatgcattgcctgttaaaaatgttcaaaaattatcacaaaagggcattatctatctgccttcttagattcttctatgaggctcaattctacctgtaacccttaagcttttggcttatgataaactctgaggataagtagaatttttttttgaaagaaggtaaaataacattttaagttaaaaaaaaaatctatacattcagatgaatttctcctcaagtggtcatctctaaaaactgctgtcatgcctccagtgttgacatgagcttaactttcacctgaagccctcttccctttaatatgccctcactgaaaaaaaaatcctaggcactagagagatggctcagcagttaacagtgcttactgatcttgcagaagacctgagtttacatcaataataataataataataataataataataataataactgtataaaatccttgcaaaccagcgttcttctaagtctgctattgaggaaaagctgacttactggcacccgggactggagactggagcttcaaactgggaaacatcttatgttctaaacaaggcatacgctacagttttcttaagggatgcatatgaatgacatgagaaattttatgcacatttttgatactaaagagatgaaactcagcaattaaaacagaaaaaaaaatgagcaacacatatgccacgggcgatctgctttacttatttattcaggtctgggagttcagtgacccagggtcttacatatgctaggcaagtactctaccattgaactacgtggtcattgttttgtttttctctctctctctcctcttgattttaggaaactgtacaacaatggatttacttcagtccaaggacatgctttcaatggaacaaagctggatgctgtgtaagtttagggtaaccatggtaactgggtaactgccaccatcccccacatctcactcccaggactatccagagggtctcagttctgttgggatctattttaagtatctcaggccttgaaaataatgatgaaggaacttgacaagggccatctggtgtggatacttaatgtcggccccagtcctgtaccccaaagctctcatcttcaataaaatggagatgtacatcaccaccatgagttatcttacaggggtgtgtgtgtgtgtgtgtgtgtgtgtgtgtgtgtgtgtgtgtgaatgttcatctgctagtacatgaagggaaagcgtatctttacaccaaaggtgttttcacaaagtgatgcaatctgttttgacatgttttttcttttctaaaggtaaatgatacccaaatgatcaaaccaaacagacttacattttatttgtcttacaattttttttttcaaagtagtgtcttgctatgtaaccctggcagtcatggaactagctatgtagacaaggctggccttgaacttacaaagatctgcttgcctctgcctcctgaatgatgccattaaagctatgcatctcttgcattgcaacccttcttatttctttagcagctatatatttttaaattcaaaattatctggtattccctcccaaacttaactgctcatttcttacagtgatgtgttaattacggcctcctatgcttctatacccttccttccttccttccttaaaacattccttatgtagttgccgactgtaaagccggagaagccttatgagtctaaatgtgttgtgtactactttgcttctcaaacactactaggcatgcaagccatcaagggaacttgtgcaatgcagatgctgattctgtcgacttgagctgggctctagaagcctgcatttctaacacaccctttcacgatgctgatgctgtagcccatggactgacttttaaaataactatgcaactaaacacagaggggctgggtagaaaagaacacccgtgcagagtaactgctttgggttgatattctggttagatactggcttctggaatggttccattttaatatgagttctggatttcttatagttaggcaaggttctctacaccttgttgaagtggagtctagctcctggccatgcttttgggcttccttccagtctctatgagagaaagggttagaatatcattcacttgggtatttggtaaaacaagagttgttatggtttgactttattcatttctttaaatatataattacaggagaagccttgtaagacgccacaggatacacacattcttgcacttaaaatttacagaactggaaagcccgattgcactaattctgcgcagcccttcatttacttctcagtatagcgagtgggggcctacagtgcacaaaacactgtgctagccactaccaaagcaaagaggagcaggaagttgcttcctgctcacaataaaaatcacattcttgtggagtcaatataaacccagctacaccaacgattaaagtgcattagaaataaatttatccaattcaaaatatgcatccactagaaaatatacaagtgcaaaataggcaaagatgttggtctccttccctggagaaatcagcatgatttgatctaaatttatcccatggtatttaaagatcagcatttaatattgtgaaacaccacaaaatattttctcctttgatttgaaagccgtcactccaagctagctggcccacaagcttcaaatcttcaacttaatatctctacctcccagaatagggatgctggggctacatatgtgcctcctctactccaggcctttatctgggttccaggaatcaaaccccagtattcacgcttgcatgcaatgtgctcttagccctggccatctctctagaccctcgcataatattttgtaacatagctcagtatttactgggttttcaaactaagaaaaacgtattagtcctctataataattacccaaacacggttcaaagattgtaaatagcataacctctctagaactgtctttagatctctctaggttctggctgaaatagattgttatccaaaacagcaatcatccacctcataccaaatgcacttcaatgatcgggtctgatctcaattacacccattgttttagcgtgactgagtaacattatcacagccaagttggatgaatcccacactgaggacaagctctgaagccacagcggcagttccccccttggttagaaatcggggaaaatcatgacaagtgggggataactcctctccctgtggtttcacagagagccaagaacacggccattactcagacaacagatcacctaatctgagtatccttgctcaaagagcagtggaactgctgtcagtcataagctggggcacttgttcattcactggatctctccgttctctcgggatacagtcttctagagctgggttgcttctcccacagtgcctgagtctctgagatgaattttctcttgttgaattctagttgtttagcttctatctagaagtaaacatttggaccaaaaataaattacttaatacaactcggctgtgtgaaggacttacccagacaataatggttattgagcagagaagtcaacacaaataatgtgctaattagcatcacacattagctgatgggaagcaattctccacagcctggagccactgggaaaagatgacgggagagaagattataggcttaaagtagactgccatttctcacgggataagtatttgaacagcttgtaggatatgctccaaggttggctgtcccctctgcctcctgcagttttgaacactttctcacctgtcaactgttgataaacaagtgacccagtctctgaaagcagcaagatttccacagagcaatccagcttcactttagactaatggaagggctcggtgctagatccctatcattttccgactaacaagagccatgcagaaaacaaaaacaaaccgacacacggttctccacagacacactcccctgtgagtgtcaaactataaccaggtgccaaccctagtttcccctaaaggaattacaaaggaatgagccgaaactctatattggaactgaaatggatccttaaactcccccagaaaacacagtccaggaagaacagcaaatgtcctcaccacagtatatctcactcctctctttgatactgaactctcgcgctgctgaataaaacctgtcctatctgtgaattatccagaaacaagactttcatttctcatcgaacaagtctttactgattggctgctgtgtgtcgagactaaatccaggggcggagagatgacttggtggttaagtgcaccaactgctcttacagaggacctagggtcatctacacagcagctcacggctgtctgtgatgccatttccagggatctgaacccttcttctgacctccgtaggcactggatgcacatgacacaaagacacacatgcagggaaagcattcaaatgcataaaataaataagtctcaaaaaaagaaaggtttaaaaagtgagtccaagagaacctgaacacacacactctcacacacacacacaccataatgctgtcaattggacaattttccccaactcattgctatcttcatttgtcccacttctcccctagctgtgagatacatcattttccgtcaaagtagatattctcaagtattgaaatgtggaaaaattgacaactgttttgtaggagaggcttaatttcttcaccaggttctcaaagaggcagaatccacccaaataatgaagtcgctaagcaggcagggttagcagcatctgttttacttttgaaggaactatgaaggctttcctaggagcccttcctatcatgttatccatcctgactctaggaaatctctcctcccatcacttctgacaagtccttctcacctcgtgaaccttctttctgttcatcttccattatcagcctcacataaaatagtcactgtctggaataggctcgcatctggctgaccaagctttgtgactgacttacctaagccaatgggtacggcactggatggggattaagttatgatcaagaaaccagtttaaagagactggcgttcccagaaaatagcatgtgttcaatgagcttaatgaaagcactttcttcctgtatgctaaaacttctgtgtctgtagttccttctgtgtctgtagttccttacccttagtttctggtagaagctgcaaagagaagtcagaacccaagagtcaaagctaaaagaggtttccctgaaaactaccagattcttagaatgtggaagaggatgacaggtccaaggtcagccagggcttcatagtaagaccctgttgcagaaaaaccaacagactgtacatggaagcaagacaaggtcatttctaagcaccttatcatcttctgaggctaagtatccaaataaccatcctgtcttttgagaacaggcccttcctcaggccggttcatctccgttcacattggctgtacctcccgccacattctttctcccattctggactctggctgcctttttcagtttgaagtcttctgcaacatttctggtaaactgcagcgcttatcaagaagtctccttgtcctcaggggtatattaagtatcagatgagaacactacaaaattggacaagtgataatttcattttacaataattaatttctggtgattagagcgagcagatacttcctctcaattattggagatgaagatcaggaaagagaagttagcagagcttacttgattttgtgcagcctgggaacaaagtgtgattggcagctacactagcccaaagatccagaaagacttacaagctggtgtggtcactatgcccgacatggttgtcacattacaaaattgtgttcataagagcctatatccagttgggatcccccccccaaggtgggtctaacccactccagctacaaccaaacgaaaggtcttcatagaccttaatgagtctgtgaacatgagagtcctgtgactcaagctaattatgacattaacccactaagatcatgtacataggctgctctggcatctcactcaggtatctgaacatacagaagactggtctcctccacatgaaatgtagcagcttgctctgctggagacaatatctggaaagcctccccaaaaggggcccagccacagttaaaagaagaaaaaagaaaacagcagcctcctctgcctcatgcttctaccatagggagccatggtatcatagacacaatggaaccaactcatctccatggctgtgaacagaactaatcaatttctcttttatactgattgtatccatcattttgttataacagagagctacctactgcactctggaagtgtgtgctcagccactacttaaagaggccatgtgtgaacctttctttgtaaatgagctacctcagcatttacagtcatcaggaaggtccattttccaaaacccaccacatcatacactaagtcttctttcaattatcattaatttttttctttaaacagtcatatgtaaccccctcgaaccccgagtgtatcaatgtcactatcttgaaggaaacttatatttatttggttgtttgctcactcttaatctccactcagtatttctggagcaccaaacttagcagtgggtgtagggcaatggatagggcatagagctttccattctgattttaaaaggcacagtattcaagtaagaaaatcaattaggtaattacagattctgataaggtcaggaggaaatagtattgggcaaactagtgctactttaaatgaatagtccttgacctctatttaaaaaaaaataattgaaagagtctaaactgtattcacatttgtgaaacctcattgtttgtaatcctgatacttaactctgtttaatgccttagcatgcccaaaagaggggagggcgataaaactcttcactgctggtggttgactgttctattcttacccacactcaccagcacacacacacacctggatccaattaaatagagggaactttctctatgaaggctctggagaaaaagttttaactgaaagtcttcaattactctactattattagtcatcttccttaagaacttgcatcctgtagtgcaaagcttgctgctatactaacgacgccattatctataattaagcagacctcccaagggtctttactgtatttgttttgcatcaagccagagtcattcgctagcgtttaaattgcctatactgtgctgcgagtcaatgtaagtgtgtaaattggggtcgtttataataaagatgtatgtacttcgtttcattttagataattttattctctaaaaaagctatggggaagggaagggccaattttaaaatccttgggtgcttttgttcattgggaggaaattttatttcaaacacacattgtgacttaaattgcataagaaatattcttctttcaaatagccagtgtgctgtacaagagaaaggatcgacatacacatcacttttcaggaaagatgctcactgtaattttatttacataagtatccctatgccagaactggtattgttggataaaatgcatgccgtttaactaaatttgaatttcaaataagcaacagctaattttggtaggaaactttgtgcttgaaaattattcactatttatctgtaaattgaattaaagtagcatcatgcattttaatttgctaaatctggcaactctgctcaaagaaaagaaccatccctaccgcccaccaccacccttaccatctccaccccagctcttagttaaagtctagcttcagagatagatggggataatagtcaatcttaagaagcaaaatctgagtcagggtagagaaaacaattgccaggaaataggaaatctagccagctttgataaaatgtggatatgcaaattagacccgaaacatagttcattttcaaagattcctgtcacaatgaaactttgccttcccgacacatggaacggtgcttaagccaggagagtgcaaggtatcgtcaaaattaatgtgaccttggttacatcttatcttgatatttattctaatgttatgtgacagcttaagtttgtctaactcattttctctctctctctctctctctctctctctctctctctctctctctctctccctctctctctctctctctctctctctctctctctctctctctctctctctctctctctctttctctcacctattctgtctagttacctaaacaagaataaatacctgacagctatagacaacgatgcctttggaggagtatacagtggaccaactttgctgtgagtaagacaaatcaatggctagtagctttttattatttttctgaaatgaaagaggtgtgaagagaggtgatgccattacctctcttagcatttctacacaatgaccttgaaggccactcttgtaaaagaaaacatatacatagggggctggcttacagttcaaaggtttagtctgttatcatcatgacaggaagcgtgtgtgtgtgtgtgtgtgtgtgtgtgtgtgtgtgtgtgtgtgtgtaccgagttcaaatgaataggaatgggaggagtctgggaattagcattggttttggtatgtgtcaataggaagccagatgctagaggaaggggaaataagggagtgactcttcctggcagacagaaagtctttcacggattcctgaggaagtattcaccagcaatcctatagtccagtgtgggctgaaccaagactgtcatttctagacctaacagtaacaatccaggagtggttccatgcagacctgtcacccagcattgagagaggcgaggacaaaaggattgataggttatttctcctcctccagggaggtgagccaattcaaaccagattagaatatattaaaggcaggtttattgggaagctgttctcgggcaagttagctggccctaaggaccagggaagtcaccatggggaaagggggagatgggaggcaaaagaaagagagaaagggcaagctcaaagagagaaggacaagagaagagagagagcaaaatgtctggattatatagggagaagtctctgggggaaggacagccaagcgcctgggctggaaagttcagaattgggggcagggtatgccaggtagggactgagggatgctgggagaacctggaggccaggtctgctttgatatgtaaatgcacctcagtcccttgtcccagatccaaaatcaaacaaggaccacaggggcttgcttactggttttgagtctaaatggggaaaaaaaaagcatgagctccaaattctgggagagaccctgcctcaaagcaacaaggcagcgcgagggaaaggaagccgcctgatgccctcttctggtctctgagtacagagctacacgtacccatatgtaccatacacataaacacacatgtacccaacacaagccacacttatacaaatatacacacatgcacatacctacgcaaagtaaaaagataaattaggggtagagagatggctcagcagttacgatcacttgttgctaggacctaggttcagttctcagtacctatctagaactcggtcagcaccgaactgatagcttcttgacttatgaaggtacaaggcacacatatgctctacatacatagatgcaggcaaaatgcccataaacatagaacaaaataaataaatcttattttaaatttccaattaaaataatagtactgaacgggaaaaaaaatgaaataaaaggaggacatggctactcctaagtatgaagatttttattatggatataagggagaagcaggcagagggaagagtccaggctaaacgcgaccagcagactatgtgcaccatgagaggagagagagagggagagggagagaagagccaccagccaagagaggcaggcaacgagagcgtagtaggcaacatggccccgggagggagaggtttagggtagtgggcagggtgaggagtgatgtgttttataaaactctgtatgatgcagcaggacgggtgccttaggggcctataacaaagcacacacacacccccatcccaccccaggtatcagccataagatgggtctaacataattttgtgggggacctagagaggattctgggtaaggaagtagaggcagagaaagaaaggaaacagagaagacagagagacggacggagacacagagagagcagcagggaacacctgaggagggggggaaggagaggggaggaaaaaagaggagaggggagggaaggggaggcccagttgctaggtaactgttgggcagaacctagaggaaatgctaacaaggagtcctgggaggagccactgttactgagtggtcctgggaggagcctcaggtcctgggttcaaaagctaacaagtaccaatcattatattaacaaaaatttaattaaatcaaataaaatataggcggacagttaaagaaatcgccagcacttggaagttcagtaagagaaaaaacaaaaaacaaaaacaaaaaacagtatcatttctcaaatgagaagcatagaagttcataaattgtgtatgcatgacctgtaatgtctctgtaatttttctcttgaacctgttgtatcaaatttttcatttttctttcccacagtcttcccctaattagatttgacggtcccacaggaaagggactgtgccctgtagtttcataacgccctcaccacaacagaaattagcaaatacccagtgaacggctgatgcactataattgagtgtcaaatagctgtccatggcttggttgccatttggtctacaagctaaacctggaaaatccaaagaaagggggattttatattatgtgtgtttctgcctcatgtggtatcttggtaaaggaatagttttctctcaacagtcaacaaaatatcatcaaacctgcctatgtaccatcttttctcaaggtcatttctcaaagaagaatttgatttccaccaggcacaaatctaggacaccatctattctgccgtccttatgccccaccccacccccaagaaggccttttaatttagtttgggaatttgataatatttttattgattaaattttgtcatgaagatactcaatcttccctttccatttttatattttctattctttgactgccttctttccttccccctttattttgaaagaggagctctttgtgtttataacagcaaagaacacaatatgtggaaatgtaatgctctctgtaacaatcaggactctccagattctaaattatgtaactcaccttaacagtacttagcgtactcatgataattaccataatagtcccgatttctattataagtacctcttaagaagagacaatctttgtgtttatatccttgagtttgtattacatgtagcaacaaaaataagcatttgttgctgtcaactgttttcaagttcagcatttgaaaaaccccaggcatggtgctgccaactctcttggtttaaataaagtaagtctttgttttctttggtgctttttgtggttaccacaaggtcatagtcttagcagaaatctcatggtaaagttctttctagcatcctgatgcatctttgattttttttttaaatgatttactttttatgtacaagggtatttttgcctgcatgtatgtctctgtgtgagggggccagatcccctggaactagagttacggacagttgtgagctgccttgtgagtgctgggtaatgaaaaagtagccaatgctcttaaccactgagccatctcgccacccctggtggtctcattttttttctattcctattaacaatacatgagaacttcatgccagccaactttctttttctttcttattgatgtgtatttgtgtgagaatgtgtgtgtactgctggaaactgaacccagggcttgcatacattaggcaaacattgtaagctctgagctacatcccaagctcttagtttttagagacacagttttgaaacagctcctgctgttagctcccaagtaacttccagcattcactaccccacctagcttttctattcatctgtttgattctagtcattacaggacgtgtaaacggtatcttattgtggtctcggtttgtggttccctgaaattagtgatgctaatcatcgtttaatatccttactcacatttttatatttttctcttgaaaagggtctgttcaaatcttgtgtccctttttctgttgggttgtctgtcttcttttattgagttgtgatcctgggtaacattttggtcctaaaggaagtcagttttagctctaaccaccaccctctgccaaagaactttatgctctcttgttctcttcgattcctgaggagagccagcctatgcaagactggtcagggtagagctcattcgttcacttctatcttgggtattttgtcaaatgcctgctgaactccatagaagctataatgaagagacaaccactctcctcttagataggctaagacgaaatgtaagagaagtgtaaataagtggctatttacacttaatgtaagaagagccttaagaggtctatagaaaaacaaaatactagttctagttactagggtttaacagagaccttattaaaggacctgtgggggtggggagaggtaggtgagaaagactacaagaaaatataagccacattcaaagcacagactttaaaagactcctcagaatcatctcgtggagaaaatgatcagatgaggaagaaggccccctgcagggcggctgtgaagatagtagtagtagccaaagaactctttacaggatgtggccctcttcaactccccatgtgccttctttacctttaaccctggctttaccacatcctgggtacttggtgacagctcttctgtatctcctagctgcttataaggaaggaatcataggtccctcaaaggagacaagaatctagctcggaaacccatgtccacatggaccctgtctttcttgctgggttgctcagaggaactcctgtagcagtcatcttggaggagggaatgtcctagggattcaaccagaagactaatctgataggctgctctacttactgactgcgaaatcattgcaaaccaaaggcaagcagatgtgttgcagtgcctggctcaggagccacgttgctgaggcaccagcccaagtgcctcatgcttctaaagacactgccccaccttcgaggtcacagcaaagacactaaaatgctatgacttaaatgctgtgatttaaaatagtatttttttcctatgccggtggctacagtagtgagagacctaattaataaatgaggctctgcagtgggggaaacccaagtatctgtagttggcatctataatggcagcattactataatgcatctataatggcatcatttgcagagtgtaccctaactagtgaggcatcgtttgcagagcgaatcctaactggtaggcttccttttggaggaagagaggtgacagagtaaatggggagatcctcagagtcagacacatactagtttcttctttaatcaactaaaaatacagccattatcatccttcaaaggaattgttttttattttaaataaagaaaaaaattactaaaatcctaggaaccactgccctggatttattcattcagaatatatgcttttatatctatgctaaatgctctcgaataatgtttcacctcctagaaaataatccaaaaatccataagttcctcttgtagaacaattttaccacagttaattgtgcaaatcaagcgtggctttgtgtttgtcttttaccatgatacaaacaatggaacataggaaattatgctgcgtgaaccccaggaaacaacactgatgaagtgtcctcaactcgaagatgtcacataaattcatagtttattagctagtccatatgtgttaaccaatgtccctccacagtgatgaacctgaagagcaaacagtacagttgtttcttccctttctctatttcatgtctgtacatacatacaaataaatctacttttaatgaatgcctatgagactctgctaaacatgcctacacaaattttatcttgtactgttgacttaaaaaaattatggcctctccattgctattcctctcataagttttgatggttttattcatattgatgcaattacttatgattaaaggagttgatgatgcataggacaatgttgtaaaggttaaaaaaaaaaacctagtgtgttatgttctacagcaacttttacttaatgatgctataattagctagacaatcccagcagtgagcagctaactgatggaggagttggtccatctgagatcatcttgtgtttcaacaaataagccacaaacatcagcacaacatggtatgcagagttatgtccacggtttgtcccgtgcaaacatgagtgaatacagacttttttgtgtctctcttagagttcttttcttacaatagtggaaggaaaatggaactctgtgctgtcacatgggcacgctgtctctggcaggacctagaaatccatcgtgttcattaaattctgactgggagtccctttgttctcatctgcttatggtagagagtgcctcttgctagattcctgtttgggagcatttttcattgtagaatccataatgcaacaggcaactccatgagctctcataacacaacacaatgaacctgtagactttaactgtctactgaatttctgattgtagttaagaaattacacaaggaaaatcctggttgcaaagtggcctaatttaaaaaaaaaaaatggaataaataagaaaagatacagcttcaaggaccttaaaatgaccctaagtttttcagtttaggaattttcttcagggaattctttctccatcagcagcatagctgggagactgtctggtctagcccagcatttggcagcatttatctacagtgcccagttcaatatgctcagtaactggtggctaaaattaaaagatgataagttgagcctccagtcatatttcctcttccttctcagatgaaagatgatgaaagaggagaaaggagaatttcaggtatataaatctacaagggcaaaggagccagtgtctggcaaatcccgaataagaaaggtaagaggagagggaaagtgagacagataactcacaggagccgacactcagaggtattgtgctcagcacagaacctttgtggcacaggatttagaggggatgtgtatggcctgtgtcaagagagaaacatggaagaaaaagagaaaggactggctgaatgtgtctctctggagacatgggcctgctgtgttagttaccttccctggcaagcatcttacaggagaaagggtctgtttgtgactttagctcacagtccaaggtgacacagtccatcacgtcagggcaagcctggtagcaagctagtcccctgcatctttagtcaggaagcagacagatgaatgtatgtgctaaactagctatctcctttttatttagtccaggatcccgtcccacgggatggtaggctttctcacttctttttaaagggggtatttcttacttcacttaacccgatctcagtaattcctcacaggcatgccaagagactcatctcctctgttattttagattctgtcatgttgacaggccatatcaaccatcatacactctaacccattcatgcaaaatgctagcatcgaaatacctccctactaagagctcagggatttcaagtttcctttgtgaagaagtatttttttttaaaaagataccatagctgacatttcattagcacaatacttttatcaattctttgagaaatccccacatatgtaaatatattttgatcatattcattcctcatgtctccctctccctcttcccagaaacgctcccctctccctccctctccctccctccccctttccctccacctcttcctttgttttttaaaataacccaatgagtccaatttgtgctgccaaaatactctcaagtgtgagcagttttctggagtgggggagatctaccagaggccacacccttaaagagacccactctccctctccaaaagccaggcagtgtcagtgtcatcagttggggtagggactcatgggcccctctcccctccatgatggaatgtaacctgacattttgaagtcccataacaataacggtcacctttcttcacaattgccctgaaacaaaatcagccagtggcaacgctcactcttgagtgttaatgaataactggaggggggggggtcaccaggcaaagaatacttgttaacatgagagataaaaaccctggtaaggaaatggaaaagtgagcctgaagattcagacattgcagaggtcggcaaggaactttcacaaagcaataatcagcgacctgataaatctaagacatttcatccccacgactataacagtaaagacagatagtatttattgaggccacacagccagctgctgctaagttgactattggtaaatggagaaggcaggattcagacgtgaatttcaaactcatccactatatttgtttctttgccttgataaatccagcatggttatatccagactcgtgaacattgcactgggcttccctgtatagcctgttaccagaggaacaaaagaaaaacaaaacaaaaaaaaaaggttcaaaaatgttctcttgcacttggcaaaccatattcagagccttcggtctaagcatcaaaaatactgctctaaacaggacagagtaccatacctcatgaggcaaaggttaaaaaatccagtacaagaaatacacaacacagtgaaggaagtctaccaggagactaaagagcaataggagaaaaattacaacaaaagataagtacaaaagatcaagatgtgtctgaggaatgcaagaggttctttttccacttcctggggattccagagaggagaaagaggaagtatgaaaaacgagtcacctcaagaatgacaccagcaaacttcccagagatgagacagatcctaaagatccagactgaacaggcaggaaacccctgtgcccaggacaaaaaccgatccaagatccgcagtgtggcaccccttcatgaaatctcacactggggatgaagagaaggttccagagggtttccgaggccagctgtaaagtaagcttgagtttagtcaccagtatggttacacaggcaagtacacacatgcaagcgtacacgcataagaggagagacagagagacagacacacagacacggacagacacacagagagagttaaagcaactccaaataacaggaacttgagtggcatcctatttatgaaaagcaaaagcagataatgtaatataaatgaacaaataatttaaatcttgaaagagaattgacatttttaaataaagattggcaacccaaaatactctggccaggcaaagcactaatggacggtaagaactgatatgctagcacgctgaaaatcttcctacgtgacctttctaggaatttgtagtctaactgagatgatggagatgatcaagataaacgatgcagaatttagggacagactccctatggagggatggaagaatggtcttccaagcttaaatttccttgaaggaaccatggctttcgtgctgttggtgtaatatgatgggattaggttttaggcagaacatcctattctaagcgttaaagtgggattgttacatttctgggagaccttcattgcgtttttgcaaagctcagctgaaatgtaattgagacgtaagctgtggccgtaggaagaaccaccggaatgcatgtggacacgtgagtaactgagctggtatctgatggccagggggagcacaattttattttactatagagatttacggcataaatgtagaccaagggcaaagaagaccccatgaaagaacactgaagcttcaaccctggaagctggtacacaaaaggcaggaaaggttttgtttgtgttgataccagtaggaataaaaggaagattcattccggtagtactatgtcaagtggagatacagggcaatgtcacctgcaaactagaaaggagatgctatttcagataacacttgggatgtctgtttagaacttgagatctctgcaaaacaagggtcaactgaaaatacagataaggaaaacagcaaccaaacccacagcagctcttgctatttgaccctatgagtttgaggagatatggaactcaccacttcaggagagacacaccaggacaccttaagcacagtatatacaacatacttgatgctcagagctgcatcaagaggtcttactgccctgagaccaaagttggagaggtagtgaaggaccagctcttcgaggccttggaggacaagacataacgagtagccaggaccctgggaagttaaacaggagagtaacattcactcgttctcaagattgttctaggtggcattgaaaaccatatcagaaggaaaaagaataaaacgtgaaagctattgcagcacaggatggtggtagctggagttagaagccaactgtgatgatgcacacatagctgttgatatctgagaggaattgattctatgacccaatacgaatatcaaaattcagactgataaagtcccttatataaaatggcatttatttgcacatagcccaggtatatcacatagcctgtgaaccttaaaccatctctaaattgtttatgatacttaatgcaaagcaaatgctatgctagcgtcacattattttattgggggagtagtgatgagaaaaactgtatatattcagtgcagatgaaacttatcttcttaaattttcccagcgtgccactggctgaatccatagatttagaatccacgggtccagattactgaatgtgcagggacttgagatcttctgaagtttaatccacagcactttgccatcttaaatgttgaagatcaacatgctgaaaatactctaagtttgagcaactgagctataggggtactgattactatgacaggaaaaagtggggaggccaaggtgggggagagaaagagggttggcagtgggtggccacaaactactgccacccctcagtttgggctctgttaagctggaaatgtctgtgaggtgtgcaggtagggatgtcacatgggcacacagacaagctaagttccaggctgcagctgtattgactgaccctttgctttgagcttgagttcagataaactcttaagttggagaaggaaggaaatgaggatctcctgagctctactaaatctcaaacaccttcatgtcatagatgtttctaaggtgtgcactcatgttccaacactgactttggccatgcctgctgtcttagagttactacatgctatgataaaacaccataaccaaaaacaagtttgagagaaaaggatgtgtttagctttgcttccacatcactgttcaacactgagggaagtcaggacaggaacacacacagggctggaacctggaggctggagctgatgcagaggccatggcaggggtactgcttgctggcttgctcctcgtggcttactcagcctgctttctcatagaacccaggaccacccacccagggatggcaccacccacagtgcaaaacaaaattatagaaacaacaaaataaaatcacacatacacgtctcaatggtttgagcaagtgtacaatttttatgttggtccagggccacattcatatagtgcgccagtctcccttctctggatgagagcaaagcagaaatgagctaaaagaatccatcctccctcagtgtcacagacagacagatagatgctccacacggtagaaatgcctaagatgcttcaagagaaattggagttgaaagacgtcctgatcttgaaagactgcatgttcggggtttaagggggaggaagtgaggggcatccaaaggacaggagaggctgcacttcacagctgtgctaaagactccctctcctccctctgttctctccccagctgcaaagttatttatgccaatttcacaaacatctctctctagtgttaatcacctggagagcatttcaatggcaagagccaaggtccactcttgttaatagtcgggattggaaaacacagaactgtagatttgcttaaaactataaaacaaaccaaaacaactaatgtgacaccttctctcacaagaagcaagaataatataatatctatggtgaaagcaagggtagtgtatgagctttatatttgtttttgttttgttttgttttgttttgttttgtttttaaagaactgtatcaagttctggcaaccttgacaatttaatcgcaaattaaatccaattgtaatgggagaagttgccaacattagatttcacttgctaagcagacgctactaattatgtttttcttttttctttttggttcttaaatagtttttatttgctgcgattataatatagttacatcggttcccccatccctttatgccctgcaaaccctccatatgctcttccttgctctctttcaaattcatggcctctgttttgcagtaagtgtcgttacaggcatatacgcacatgtatatacacatatttctaaatacatacacataacctggctcagtctgtataatgtttctcatatacatttttatacctgaccgtttgagattagataactaggtggtgtgctcatcttccctggggaagactatttcttccactctcagcatttctgagttgcctggagttcttggtgtaggactgaggccttgtggtgcctttccctgtaaaatctactttagcatgtctgttgatgctgtcctccatctgcccatgcttaggcagtctcggtggtgggactttatgggtgtgtcctagaagaagtaaacttactgttcctctggtttacaattgttctggcccctcttctgcaatgacccttgggtttaggaattgttttatagatgaagccattgagactggattccggtcctctgtattttgacgggttgtggttttacgtactgggttccatctcttgcaaagagcggttcctctaataaggggtgggaactacacttatctatgggcataagacaaatatttaaatgtagttaggaatatgcttgcttagtaaagtgaaattgttagttctcctccaaggtccattacatcactagcctgcttgctggctaggtttccagtagcaaacatggtttccctctagttaagacggtcttaagttcaattagagatctattggttatcacctgggtatgtgggcagtgcttcatgtagctcaggctagtttaaactcactgttagctaaggatgagggtcttgtactcctgagactcctggcactacctcctgagtgctaagattatgggcatatgccaccatgccaggcttacttttttttctttttttagacaaactctcactgtgttggcttggctgtcctgaaacttacgttctgaaacatagcctggttatgtagaccaggctggcctagaactcttaggagatctgcctgtttctgccttccatgtgctaggattgaaacatgtactaccactcccatcttctagtacatattttaaatataaatataaaagccttagagagggaaggcctagtgactatttttattgatgaaattaaaaggacagagatgatgggctaaatattcatgtctttattcaagttatttttcagtacaagaaaaattatcaacaagacacataatctctcagagaagcagggaaggagtaggggacaggcaggagggggctgtgattgaaatgtaaagtgaatggataaataaattaataggaaaaaagtcatacaaccaacactctttgggactgaagaagagagaattgctacatcaaagcccccccaaaaacccatcctactttaataactaacattaatatacaactcatagctctactacattccccttccatgatttgcagaagaaattttcagatcatattttcagattaataattatcttttttcataggaatatacttatagtcttctaaaaagaatctgtatttgtgggttttcttagctatgacctgcgatactattaaatttttagggtctgcacttactggggagtattttcataatatagagtctgatccctatcaaaggagtagtttatgtgtctacagacctcacacacccatagacacacacacacacacatgcacacgtacaggcacacagcaaagagtgataagagtttaggcgccattgactttgtccgatttatattttgtttctggagatctttagttgtacgatgtcattttacaaagtaaagttcacatccctccctgattctaagagtttacagagagaataaaatttttgtggatttgggtgattaaatgtaagaattccactcggcaaaagccaggcagtggtggtgcatggctttaattctagactggtaagatggcaggtaaaaaccacttaccacattagcctgaagacctgagttcaatccccagaatccatggaaagccaaaaggagagagccaactccatcagactatcctctgacttccacatgcatatcacggtgtgtgtatactggaaaacacacacacactcacacacaaaatacatacacacaataatgacttattaaaaaattttaaaaacagcagttccttgtaaccttgatttagaactcatatctgctgtaggccactgcctacaggtagtgatttcagattccatagtcaatagcagaaaggaacttgtcacctccccattaatctcagaaccgtttgactggaggaaagaggacaaggacaagaagggccttgtctgctcactgcctgtctctgttgttctcttctccatacctcagagatgtgtcttccaccagcgtcactgcccttccttccaaaggcctggagcacctcaaagaactgatcgcaaaagacacctggactctcaaaaagctcccgctgtcgttgagtttcctccacctcactcgggctgacctctcttacccgagccactgctgcgcttttaagaaccagaagaaaatcagggggtaagtagcaggcacctgggatagccaaggagagcccatgatgggagatggagtcattcatagatttggaaaagaatgtgatttgaagcccaggagggaaagagctgcaagcatccacatgagcaggaaacccatgggcctaactaacggttgtgggggcagatgagaaacaaggccaacattgttggattgctgtggagaaagagggacaataagagatgacaccacagagacaaggttcacttgtctagggtgtatagagtttgaggtgggcttggcttgaatcccaaccccatctgcttctaactgggttatctcagcctacttatttgactactctgagcttttaaggatcaagctcatcacattgccatccataggggggttaagaaggtgaagaggttaaatagaaacgcttggaattgaatggctggaatgtaacaggtaaagcatattaactgtgacatgttatttcactatctggctgtctacgagactgctgaggagagactcattccctcgcactttacactcgcagctgttcctgattcttgctctgacctagttccccttttatgtcttgggtcacctccggttttaacccggccttcattttctatttctgtctcctttagtttctacacaattatccactagatgactctctacactcataattttaaccagctaataaaaaaatcaggacctagtcatagagacagatgcaaattggaaggttgcagagctgggcgagtgggagcatcaaggccatgctaagacatggtgttgcaatcaggtgctgcactaatgctgcttgacactgagtgggaaggatcggggatgaatgcatagatacagtggacccccctgatgggtgtgactccagtaagatagaagaagacttacaccttcccagtcccacatgacgtatctacaacataagccctgtacctaactaaggctcagggatctctgaggacgaacggatggaaagattataagacccagaggaacggagagtctacggagaaactgtgtctcctaggaatgtcaaaagctacatccagggagtctcaccaacatgactacccaaatgtgagaagaacaaggccaataacaatagaaatgtaatgtttgtgtggggaaagcccataggcctcaactctacacagggaaaaacaggtaaccaagcaactctgagagtcggagaaatagcgttcccagggaagaacgcaccaatttgttatccatcaccaaatggtcagccctaaaatacatgcaaacaatactatataggctgggcaggttgtattatgtatttaggaatacacacacacacactgctacaaacaacaacaacaattattgaaaaaagagtcatgaatttaaaagtgagcaaggagggtatatggtagtttggagtgaggaaaggaaagggggaaatgatataattatattataatctcaaaaacaaattggaaaggtcaagtcctatttctatcagatatacctgtgtgctgtggccatttttgcatttgttagcaaatacttaatgaacatctcttacgtgcctggcactatcccggctccatctggcatatgaggtggcttcttgcatgtagcttgtaatctactggaggaagtcgacatagaaagaaaagtcagtcagggttgtgaagggataaaaccacaggcgctgggggggggggcggtacagaggagggggtattcaaggaagccaggaaaaacccctatgaataaaagcagcatatgtttaaattttaataatgtctagaggcggccacgagtttctaggcaaaggaagtgtggagttctggaactcagaataggagtagtgttaacagcaagtgcaaatacagagaaggcacagcccctgctcccagtactaccataacatcttgggaaaggcacttacctattcattcaacactcttgttccattcacaaatggaaccaagtttcacagatctgtccaacatggcacagttagtaacttagccatgctctaagttggttcttgtgtccatccttcttgatcatgactcttcttgaagtgactcaagatgaggagaaataagatcagtgtcgctggtcacagtaagaaaggtgaggtcatataaacagatgtaggaaagatggctcaaagagaggcttgctgccaagtcggatggcctgagtcccacccttgtcgccacggcagagtgggaagaagagatcggactctcacaagttgcccttttgaaattaaaaaattataaacaagtgtcatggaggatttaccagtgtgtgcttagaaaatattaagttacccagaagtaaaatttacctgaaaaggccgtgcctcagacccgagtctaagataagttgcatacgtgtaagataaggacgtgaggagtcctgcttacaagatgaattagaattcagatccaccagaggatgtgtttctttagaactcactcagaaagagcccgacttctcatcagaaaaagcaaaaaagacaatggccttggctgtcacttgataagacagcaaagctggtttgtttaacagagagccagtatgtgtgacactcagtgtaatctaaaagataacccaaaaaacttcagctatgctttcttgctataaaacctacctaatcgctcagaaaatgtagcttggcacgggagcctaaaaagccacctgcacatgaaagcatatgtaagattcccccgttacacatcaagctggcaggctgtggaggatttctgttggtggctggaatccaacgggcctagctggactctggatgtatgatgtttttcctaaggggttctcattaatttttgaagtgcctggagtgacttctgattagcaaagtttaattctgccacgttgaccttcatgccacactggtgcacgggcacataataaattaagtaaccagtttttaatgatgtagtcaggcctgacgagaccctgcagaattcatcacaccatgaatatcaaaataaataacttgtatatcttcccaagggtcaaggggatcaagggtgaactttaagcaatcggtgactcgtctctgctaccttgcagaatcctggagtctttgatgtgtaatgagagcagtatccggaaccttcgtcaaaggaaatcagtgaacatcttgaggggtcccatctaccaggaatatgaagaagatccgggtgacaacagtgttgggtacaaacaaaactccaagttccaggagagcccaagcaactctcactattacgtcttctttgaagaacaagaggatgaggtcgttggtttcggccaagagctcaaaaatcctcaggaagagactctccaagccttcgagagccactatgactacacggtgtgtggggacaacgaggacatggtgtgtacccccaagtcggacgagtttaacccctgtgaagatatcatgggctacaggttcctgagaatcgtggtgtggtttgtcagtctgctggctctcctgggcaatatcttcgtcctgctcattctgctaaccagccactacaaattgaccgtgccgcggttcctcatgtgcaacttggcctttgcagatttctgcatgggggtatacctgcttctcattgcctctgtagacctgtacacacactctgagtactacaaccacgccatcgactggcagacgggccctgggtgcaacacggctggcttcttcactgttttcgccagtgagttatcagtgtacacactgacggtcatcaccctggagcgatggtacgccatcaccttcgccatgcgcctggataggaagatccgcctcaggcacgcgtacaccatcatggctgggggctgggtttcctgcttccttctcgccctgctcccgatggtgggaatcagcagctatgccaaggtcagcatctgcctgccaatggacaccgacacccctcttgcactcgcatacattgtcctcgttctgctgctcaatgttgttgcctttgttgtcgtctgttcctgctatgtgaagatctacatcacggtccgaaatccccagtacaaccctcgagataaagacaccaagattgccaagaggatggctgtgttgatcttcactgacttcatgtgcatggcgcccatctccttctatgcgctgtcggcacttatgaacaagcctctaatcactgttactaactccaaaatcttgttggttctcttctaccccctcaactcctgtgccaatccgtttctctatgctattttcaccaaggccttccagagggacgtgttcatcctgctcagcaagtttggcatctgcaaacgccaggcccaggcctatcagggtcagagagtctgtcccaacaatagcactggtattcagatccaaaagattccccaggacacgaggcagagtctccccaacatgcaagatacctatgaactgcttggaaactcccagctagctccaaaactgcagggacaaatctcagaagagtataagcaaacagccttgtaaaggaaaggctacgctagtcacagtgagacttacaaaaggctggtttcttgaacatgcgttccagtcccgtgacatgtgaacacataggttcatgcaggtgatgattcatagggtcagagttcatctctagaaagtattgcctctaagaaggaagagacgctatcagcatatctgagtcctaggtgatatgacaatcgcctatgctcgctgggagatttgcttgttgcttgtctatgatgccatgcaacatgttccacagacaccagttgaaccattcccacatcttgcttctccattttatgtagtgttttatactaaagactcaacaactggccagtgttcatcatactccatattagcacccctgaaagaaccaaagaaatgtttttattccttaaaaataaaatgccaaggtaaaatctggactgttaataaaaaaagattaaataaaattaaataaataaataaaatgccacacttggaaggtggaggtaggggaatccagttcatacttagccacatagagaattccaagccaacttgtgctacctgaagctccacctcaagctaccaaaagaagcctggaaagccaaacatatagatgtcacataattgcttttattaaactgaaaaaaagagcacgtctagttttgagaggtttttctttgtttttcttccttagactctgaatcaatcatcaccaggctctgcctgccgtgacccagctgttacacgctgactggagaaactgccaaggtttcagcttttgtggctgagcaaacttaagaattatcttctcatataaaacatgagctccgggagagatttctaaggaccacatgggaatgaggacagggcacacttggccacgtgttgaataagacaactatataccagttaacttgtcgggctttgagcaagtctctggacctctaaattctgtagaaatggggggatttgatgccctcttccattaaaaaacaaaaacaaaaaaacctaggtatatatccccctcaaaagatatgtgtgacaaagacaaagaaaacactacttaagtagactcggttttttctaccttgtgacgctgctgtctacttcttttaggaaccaggacatgtgacccaagatgctttttctttatttcattctgatcatcgtgtctgaaccaaaagttctattgagtgactgactatgtggagccagatcctaactattcatctaaattattgtatctatactactgtcaagtccaagacatactggaatttatataaactgttaataatacagcccagctcatgtggtgcacgcctttaatttcagcactggggaggcagaggcaggtagatctctgaatttgaggctagcctggcctaagacagccaagtgtacacagagaaaccctgtttcaaagaaaaaaacaaaacaaaatagactactaatagagttaatatgtgactatgtaggctcactttcaaacatttaactcgttcttcttcttttttttaagctctcctgggctcacaccacactaacactgtcaagagagaaatctctttactgacactgccagtcccttctaaccctgccagtcactgacataaaacatgtgtgtcccaagagttgccttgcttcaaacaggaactgcatctccaggtgtaccctccaggtagccagtctggtcaggctctttaccacattgttacggagtccccaagcagatctggcatgctcttctcagtgctcatgagccaaagcaggaactataaggggctcgccactttcagcctatgaagtagggtttatgggtcacctgacatggctcctatctgcctggcctgggactctgtcacggtctcacaagcaccggcttccccagcagttcacgtgtaactactgaaattaaataactgtgctaccctgtg

SEQ ID NO: 83 - DNA, 190137 bp, Pan troglodytes
  variation 20391..20511: note = n is a, c, g, or t
  variation 87105..87114: note = n is a, c, g, or t
  variation 88427..89017: note = n is a, c, g, or t
  variation 111179..111481: note = n is a, c, g, or t
  variation 125014..125637: note = n is a, c, g, or t
  variation 161905..163296: note = n is a, c, g, or t
  variation 165782..166161: note = n is a, c, g, or t
  variation 174399..174731: note = n is a, c, g, or t
  source 1..190137: mol_type = genomic DNA
actggacccattaagggaacccggaattatttctgccattcccgattattcccagcagatggccccaaagttcagttcctgaattgcctcggggagccgcgggctgcaacgtgaggcggccgctgccagtcgactcaagcgccggagtggcccctgcagttggatagcaacgagaatcctccaggggtgcagggcgacggcttcggccgcaccgcgggctagccagggctgcgtgcccgcctctgaccctcagcagaggtgtctctggccaggaggagctgaagttctgcaggacattggtccgcccgcggacagtccactccgcggggactttctctggataaggagtgcgtgcgagtggctcccaggcagacagggtgtctagaaggctacacgcgagggaaggtggctccttggatttaaagaggaggaaaggagggggcatctaaactaggctttgaagagaactaatgggaggggcgcccgggggaggggggcgggctggaaaacagaggggacagccaggactggtgttgggtgtcagggaacagacggagcggactgcgtgggtccagccaaggaaagtgaagcaagcaggcttgtttgggtcaaggttgcctagggaagcggagcacttaagtgcctctttttccccttctccagcctcttccacagtggtgaggtcacagccccttggagccctccctcttcccacccctcccgctcccgggtctcctttggcctggggtaacccgaggtgcagagctgagaatgaggcgatttcggaggatggagaaatagccccgagtcccgtggaaaatgaggccggcggacttgctgcagctggtgctgctgctcgacctgcccagggacctgggcggaatggggtgttcgtctccaccctgcgagtgccatcaggaggaggacttcagagtcacctgcaaggatattcaacgcatccccagcttaccgcccagtacgcagactctgtgagtacccgggagagatcagggtaggacccagagaccaagggcatctgcagaggtggcccgaagtgcacaaaagcagctcaataacagcccgaagtagtgtgtgtgagtgtgtgtgtgagtgaatgtctgtgtgtgtagatgtgtgtgtgtgctaaaaacttaatcgcccacacttgggaaggtatcattgttgacatcctcattcccaacacagaaaaatgttacaaaactttggtgtacgatgaccgtgagagctgttctttccaacaagctgctattcagcactttgcctaaccctggttgaatctgttttatttgaattaataaggataatggcatctcaggaactgacctttttgatcttaccttgggtaataaaaaattgcaaaaatatgtatttctcctttttgtttctcttgatgggaggttatcttagcagttctgctgattcatccaattgttgacaaaggtttaagcaggggccctttttaaaatgaactatctatacagtatctgtaagttacttactcaaatgtgaactgccagtgaaatagtacgtccagaaccctgctttgtgatagaagtataaagaaatgaaatttcataaaagtatagtacatttatctgcatgttaaatgttaccagattagaaacctgatgttaaataagattatacacacacaacctgtttcttaacagcaatttaaatcagtgatcattgaaactgtagacaaaaccaagggaataaagtctgtcttgattggttaaaaatagaaagaaaggacagtaaaacaacctaggctggttaaatccagttaagataaaaaaatgcaggttattaaagaaaatgttgatagatgaaaagaaatgggaaagttgcacctctagattttctcaagaatttagctcataaagactatttaacagtagatgaatatttcagcacagaaatatatttctgtgctcagagataccctagtgtcttagcacacctgaattaattagttcaataacctccaaacagtgtagtagtcattctccatgctgccaccacagaataaaatgtgtaaaaggtataatggcctcttgattacacctctacatgggttgcttgtcacctctagaataaaattcttttgtgcagcctaccagatctttcaagacctagttaagtctttccaacctcattgctcctaatttctctaacttccccctcctgctgagaagaacttctggcgcctccccaaaggtccctgctgttacagctgcccttgcctttcttcccactttctggcccctctgcctaaagcacatttcccccatttcttcacccagctaatgcctactcccagatccagatcctggatcaaccctgcaggaagcttctcctgacccatgacctttaggctgggtaagctataccccccttcccaacagcgttctgtgcatgaacctaaccctagcccttagacattgtctactttcttgtaacttgttatttatttgcatgtccacccaagcaggacacaagcttctctaacatagggacactgccattcaaccctgaattcctgaaaccctggaactacttagacactcaaaaaaaaaaaaaaaaaaaaaaaagcttaagtgaataaataaacaaatgaatatgccaggtctctgaatgtccactgtatgttggggagaaagaaatccaaagacatcacttcttcagagacttctttaacagtggcagaaattcaagtcattgaagagagatgtggctctgacagtgaaaaggaactcgtagacatcctgtttaaaattccaccaaaagttgagaaagaaagggtaatggagaatgagcaatggaacaggagtcaggaaaccagcattctcttcagcccttctttactaaccatgaaattgtgtaagatgactgatttggaaggagccaaatttccttctgggtaaaagagaatgttcaactaggtgctttctaggtgatgacatgatgctgatgagaatagtctgagggaaggcactgaatcacaagaaaaagacataaagacagtggcaaggaggatctgcccttgagaataatggagagggaggtagtatgtcctgaagaataaagttattctgagatcgaaaagagaaacctgatgaaaagtgtgggtaaaacaaaatggtagtctcctttgaacaatggctactaccatctgcaacagtagaaaaatgatttttaaatcttttgggggcggtagaactcttctgttgaaggaaagtatatgagagaagtaaaacatgtaaagctaacaattatattttgtttacttacgggggggagtcctgttctcagcactttgcatgaactcacgcagtgaatcctcaccaaatccaattaagtagatgatgttattatcctcactttatagatgaggaccttgaggcacaaaaataaaatgaagtaatttgctcaatgttgcacagcttgtaagtggtgaagtcaggatttgaatatcatatcatcaactatggagcctgcacccttaagccaccactctcagatgagaagtgtgtctcaccataccagtgttcccctgatggtcataggctttggagaaaaaagtctgaaaacaagtcacattcaataaaccgactgataacctcgggggctattcatcagatgcaagcactgagaaagcaggaggttagcagggaaaggaaagaagaaggaaggaagaaagagagagtggaagagaggcaaggaggacaagaaagactaagttagtctttcttgacaagaaaatctagatctttttttacatctttctagacaagaaagatctaagttatggaaggtattccttgctgaaataaaccaagtttttgtcattaaaaagccgttctgggtggtgacctctttttggaatctacttaaattatacaggatctaccactgaggcatgttctctcacaagttttatattattcagagtgtacctctttttaaagtttttgaagagcttacactggtttaaaatgtaaggtattttgttcttgtagagttatttgcattacttctgcaaccttcatcaagatgctgtataaccacttcttagacattttacaaattatgatggtgccgagaacaactctttctaaactttatcttctactcatagattattgttctgaaaggtaaacagctctcttgccctactacccatatcccagccccgtggtcttatggatgcaggggagagagttacggactgtggccctcactgaagaagtgatgctgtatcttttcctcactcctcccctccagaagggtatgatgctttacctgagtggaagatgagggagagctgggatccctacttcccccactgccagtggaacattctagaatctttgatgtgtaggtagtttgaaaaaaatcactctcttccattgaaaattactgatttaaggaaacttaaatgaagcaagagaataaaattaaaaatttaaatgttggcatataattatagatcatatatctcaaaaccaaggataacaagattgacccatcaccttctcttactcagaaagttgccatttgttgcctctgtgcatgagaagatccttccttctctgaataaggaggtagaaaggatttgacaaccattctgcaccattctatgtatttgtgtggattcttcctccagaaaatgctggcacgccttactatgttgttttaaccctgctttcagtttcattatgacagtaactgctacctctgccttctccaaccccactgccatctgtggtcttgggtttcgacgaagtaagtggtttggacacctgtgtgccttcagatatgtttctgaaggagctgttgttttcaggttctgtttttactcatttgcattctgcatctgtggctctaattgagggactctcctactgtttactaaactgaagacaatcattcatcatctttggcatttgtaccctgtgttccatttgtgctgttatttactcagtatttttaagttgactcgcttctctaactgaaatttatttaggaagattacaagtggaaaattagcatgacttggtacaaataagaggtaaccagaaaactaaagacagcaaaaacaaaaatataattaaattctagctatagactattgtctgtgaatacactgagcctacagctgccttctctttgttaaaaaggaagcgaagtaagtgttaataagtattaaagagataacaatctggcacggtgtccttggtagtatcgaaaggatggaaagacaatacaaaaaggaattactttctcactgtgtgattcactgttatttaatgccaggtgggcactccacctaaaataatctcatgtacctccaagtcatctttgttccacacttaaagaaatgtggatgttttgtatatttcacaatggttttagtcacaatcagtggttgtaatctgaataacaattgtttccaagctaaagagaagctcctgcttcaacacccacgtgctccccaaacacagccccacacatataaaggtgacttcatttcatatatccaggctctgtgaattattcttttccattctctctctcctctcccatacatatgaaacactgttctaagaggagtgaagaattctgacctgaaagttaaagggatttgatttattcacttggaatgaacataataatgaacaataaaatgtgtccatcatatatatatatgagagagaatatatatagagagggaatatatctgtatacctatatgtatatatatttagacagatatatatgtgtgtatttaaatcagtcaaggtttctgatgataagtaacagaaaaccaactctgtttaggttaaggaagaaaaaaaatattttgaaagaacatgtaatttacagaattactgtaggaccaggctttgaaaataggccaaggcctactgtgggcaaggaactggagccacagtgaatcatctgtttaggacaattccatgggcaatatagaaaccacagccactggacatctgcggtcttgtagctgccagactgtctatgtgctgccatcagtaatttcccaactgtccctgtctctttaaatatcctacctgggagtggtatcctgtatgggagcatttgattggctggcaagccatagctgctggaggtaggaagaggaaggaggtcacccgcccacttttggcgtctgaaataggagacgcagaactgggtccttctaatattccacacaacaggggattccccactgaagaggggccatatgccctttacattgctcatcacttccttcattctgcaaatctttactaaggactaactatatcccagacactgtgtcacactctggacttaatggagaacaccaccaacatgtccctgtctgcagggatcttacagtctagtgtgggagctgcatattaatcaaataattacataaacacagagttataattgtataagtgtgcttgagtatgctcttagtaggggtgagggatacttacttaaactgcagttcagggaaggctttgagctacctcctgaagaaccagtaggagttgagtgtaagaagtttcagtggagcaggtagaaggtggagatgtggtgttccaagaactttgaagaattctgacctgaaagctgaaggggtttgatttattcacttgggatgaacatattaatggacaataaaatttgttactactcccttcataactcagtacaggttgaggtgaattctgatgtccttgggagcagtttctatgcccacacaaaaaaaacagttaatgggggtagctggcttcgtaaattaatatttggtttgttaaagaaataaatgtaaaacctagttctttattgagttttctatgtatttattattttgtttggaaatctaatcataacaattactttgaggagtattttatcatttaatattttaataactgatttcccatatagtttaatcaaataataaataatttaaatgaaaacaaatttaatgtattttattttaaagtacttgaatgcttgatgaaaccttcccaatccttagaaaatttgaaaacatctattatattaaactttataagtaccaggaatcctatgtttttagattgccaaactctggagtgagatcctccgggttgaatgccttggtctgctatttcctaaatatgctttgggaacattgcttagttcctctgggcctcagtttctccatctataaaaaaagagtaataatagtccctgactcaccagattcctgggtggtatgaatgagttaatactgtcaacagataattttcaaagaaaggaaaaattgtaactctcatacacctataaattgaacacatgttaaagattttaatgaactcattgatgagtgtatatgaattgcctaagattgccataacaaagtaccacaaactgagtggcttaaaacaacagaaatttactctctcacagttctggaagctaaaagttggaaatcaaggtattggcagggtcatgcttcctctgaaggctcttgggacaaatcctttctggttcttcctaggggctggttgctgttgccaatccatggcattccctgcatcactccaattattggttttaggctcaccctcattcactatggactcaacttaactcattacatctacaaacatcgtatttccaagtaaaatcacattttgtggttccaggtagatatgaattttgggggcatgctttaacccaccataatgaagaacctggtaagatattacaactggcttaaagggtagcccaccaactagacatatttatagattaggaatatcagagtgactatgcagatggaggccaaactagcttcttccctagtcggggagggaagttcatagaagctcttccatacgggacagaatttacaatccgtagacaaaattgtttgcgttgctacaattatctacaatctagaaaggtgtaaaataattcccatagaatcagactgagaaacttggaaaggtgtgctctagtcaatacacagcttttcattgaaacacatttttccccagtaatacatgcaaaattatagaaaagttaccacctcccagtgagcactatacaagtaaacttattaaaacctctaatttccttttcaacttaaatcacaagtcaaaataaattactcaattatacattttaaattggaatagcaagaccaatctattagatatcccaactaggtcaacaacttctgttaatacaaatactcaaaataccaaatatatattgattattcttaaactcaacacaaacatattaatactatgggtctgatttagattctcatttctattgttaactctaaattttcccaagctaaaaaatgtttattaattttaaaaattgatcttcatcccctaatgaactccaggttctttatggaaccatccactggtttccaggttccatatagttagggttgccctatccaaatggaccctcctcttacacctgtaaggcagaaaatatcttttctttacccatcacatggtgcatggctgagaccctacaacaataaaaaacagattgacaagaaaaaaacattaaacaactattaaatataagttttacatgacacaggaggcttcagtaataaagacccaaaggaacagagaaaactgtatctttttatggacagtcatacggattggaggacaaaaggatatgatcgaatggtaataaactgtggtctgtggggcagatcttagcaagtcttatttgttcaaattcatcttggtgtctttgtgtcttcattccttttctcctggtgtagggagagcccctctgaaatgagggtcttaagacctactttagacgaagaccagagaattgtctgatgacctgattcaggggagaagggcaggaaaaagtcggagagaccttctgtttctgttgttttctcaaatgccaaggtgtcacatttggggatagaatgtcttgaaccccattacatctgtcattcaagtgtagttaatagcattcctttcactctcaaaggtgtcccaatttgggggataaatttctaatactaatagatcttcctattagaccattaagtccagaggcccgtgggacatgctcagccttgtgtttcattgccgtaggtgggagtctatcacttaaaagaaggttggtctcagccaggtggggtggctcacgcctgtaatctcagcactttgagaggcggagcgggggcggatcacaaggtcaggagatcgagaccatcctggttaacacggtgaaaccccgtgtttaaaagtccaacctcaacaatcagatcagttttgatgaggccaagaccattcagacatgatatcagaggcctagatccagaatgtccagttattttcatctgtgtgaacaaattagctatcctggggcctaagtctattttcttagatcacctctgatgaagtagtaagcatagaaaactaattcgtaatacataaaacatattggtaaatgaattagttttgtctgaatttatcagtcaatttactagagtagtagttttttgtccagagctgagaaattaagttgaattgatctatttgattatttcagtgtttcctggttatacaaagtgtgtttgttacccttcagactaaggtttattagacaaaagttcatgggcctccaggagttcgtggttgcgctcttaggaatctgtggttgtgtgaaaatttgtccccatcagtgcatttctgagactctataactttccttagatcttcaaaggtgtccttgacccctcacaagttaagaaattctgctttggaataatttggcattttgtaagtgtactcactatgactcaatctttttattatattacaaacaaccctaacagacatattttaacaataaatgaaaatcgcctgacctttgtgtggcaagctgtcacagttagttactacttgagactgtcattttgacagttactactgttactacttgagaccgtcactaggacagttactactgttactacttgagaccgtcattgtgagaatgaacaaaggaatgaacgtagaaatgaaaaagtaagacaaaagaaactgttttaaagaaggtgtccaggggaagaagaagagagctccctgcttctagtgagcaaaggcagcccctgagcttccacagccctttgtatttattgggtagcaagggcagggaggaggaggtaacgattggtcggctgcttaattgatcatgggttcatattgttactaacaggcttcagatgtacctaattacaagaaacactgcgcttggggtgtgactgccctcagcattccttctgggtggaggacgcacttttgtcagtttgccaacattctgcatttatgagaacagtttgctgtttactcatagagcctccagtggtatagtgagttgatcacgaccctcactctttcagcctgcaacacctttgaatgtcatggttttccttccgaacatgttattgtggtgattactttcttcatggctcacacttagcctgtcccttgataggctcttcacacagaagttcactgaatgttgccactttttcaagtcaatagttgacagattttttcaagtttctaatgcctcctacatgatggtaaattcttcatactgactctgtttccatttttactgaagctggtcaacatacttaattactctctttcattacattaattaaaaaatagcatttgaaaattttaagaatgagcaaaatggtcccatttgttcaaaattatagattgagttttaaagtgttccatttagatatcagaccctacttacttggcttcatttctgtatgaacctttaagaacatttagggtattccagaaattttcaaaataattttttaattacaaagttggcacttgtgatttttaagacataaatattgttctcttatatgtggtgacaggtatatgtgctctggatttttatagcacagtcccattgaaaagactgccatcagaatgtaccagaaattcaaatatttcatcatccttttaatctaaacttcccacatcacttgcgcacctggaaagagcttccttatgtccaaatttttctttcagaaaacatgatctctgtatttatatgacacatgaagcttttggcttatattttgtaggcattaacttaatcttacccttgcctgtgtgttctcataattatgcaactccagcgaggagactgaaattgtttcctcttattgccaggtactgtcactttatattttgttatttcaatctttttttaagccaagaaactagaaggctacttttaggaaagggctctgtgcatgaaaataaagaggatctaaggacgggcataaatgagatactcttccatgagaaagtctttagtgggctttgagatggcagtatttccatctcaacacccttggcagttatttctgggtttgtggacatggtccaaagatttgagatgaccagaaatactacctctagacaggtggcattttattgtaaaatgttcttccttctttccttttttatattttaaataaatatgtattgatcacctatcatacactagtactattctaggcattgatatataataaacgacctcattgattttacatcataacaggagaaaatagcaaaaaaaataaaaatttaaaaatttaaaaaagtaaaacagagaatgtcagatggtgaaaagtataatggagaaatataaatgaaggaagagggagaaggagtactagaagttgcattttaaatagtcagcaaggtgtcttagtttgggctcctctaacagaataccacagactgagtggcttacacaataaccatttacttctcacagttctggagactggaagtccaagatcagggtgccagcagatctgttgtcttgtgagggctgcttcttggtttgcacttgaccaccttctcattgtatcttcacatagcaaaaagccaagctcacctctcttgtgttttttattataagggcactaatttcgtcataaaggttccacactcataaacgaatttcctcccaaaagccccatcttctaatactatcacatcagagattaggatttcagcatatgaatttgggggacacacaaacattcagtccataacagaagccctcactgagaaaatgacatttgaataaggacctgaagaagctaaaaaaggaatccaggctaatatctggaggagaaaaaaaaatttatatatatatatatatatgtatgtgtatatatatatatatatgcttatttttggaatgagataagaagctattaaggattttgagccacacacacacacaagcaagacctgacttacatatttttatttttttttgagacagagtctcactctgttgcccaggctacagtgcagtggtgtgatctcgactctctgcaacctgcacctccggattcaagcagttctcctgcctcagcctccctagaagctgggattacaagcatgtgccaccatacctggattatttttgtatttttagtatagatgggttttcaccatgttggtcaggctgatctcgaactcctgacctcaggggatctggccgcctcggcctcccaaaatgctgggattacaagcgtaagccaccccgcccggccctgacctgacttacattttagtaggatcaccctagctactacgtttcttaatagggtgagagatgatactggcttgaaccagcttaattgcagggaatgtggtaagaaatttcctgggcttattttggaggtgaatccaacaggattttctagcggactatgtggactttgagtaaaagagaggagtcagtgatatcttagtctgaattctccagaaagcagagcccatgtgagaattcttattggggagtatgatcccaggagcagaaggtaggatggggaagtgaagcagggagagagggagagtttgctgctgctagaaacaaatggttgctgaaacccctgagaccacctgagaattcagatgacttgcatctcaggacccttgctttaggaaggaggaaaggtaaaacacctatccaccagttcttggctcccatgagtcagggatttaattctactgaccttccaggtttcctgtgcctgggtgatgaaagaatttcctgatattaacaaaaaagtccccgggtgggagatgagaggtgtgtggtacagggctgagatgcagtactgtcgagttgtacctgcctgaagctagtcagagctcatacagaactggtagctgcagcagggctagcataagaggcaagctgagagaatctaaaatgatgtaaaacaggtacccagggttggttagcctttgcacaactcagacctgcccaagcttttcattatgtctagctcccataataaaatatagggcctccgattttgtaagaatgagatgtccttactttttttttttttattcttacaagaaaggggaatacaagccccatcttccacagattccttcaagatgcagtccttgcaaagacataatgcaagagggtttgggaaataaactagtctgccctgctgcagctgatcttaaggatgccattgatagtccttatctctctttgtctccaatcctagatttgtctcacccttgcccagcactctgactggttgagttgattgcctgatggaaagacccagacttcagctccaagggttctgaaagcttagttgccttgttcttgtcatacatagctgctgtattttctccttcaccattatctgtgggctcaaaagaaccaagagatgccccagtgaattccctgcattctagacacactcctcactcttcctaatgtgtagcagctgccctagcttctcatggtaaagagggcctaatatttctcaatagggaaactcctttatttacctatttgtcctctagcatgagaagctcaaatgaccaggtggtcattatagtatcaacctccgtgtattggaggaggaagaagtaatctttctcctcaggaactagtaccattaattgggcaggaatacagacaggaagctcaaaatttgaatgttaggttactagggtgatggtgagatgagccaattctatcattgcccccgggttttcagacatgtgtatcctagctacatagaacacaatagcatatgttggctattgattcagctcatatcctttcttaggtcagatccccaatcctgcagggctttgtccccaagatggcaccttagctgagtctttaattcattccaccattctcgtaggcagtctggttcttcatgacagggcacatagtgagactagtggatatagtgttcatatgccctttgttgcaccttctctgccatgaaatgcatcccttggttgaggcaatgctgtacacgttttcgtactggtagatcaggtattttataaacccttaaatggtggtgccggtggaggcattgaagtcagagaaggccaaatccaaagtaatcatgaggttttaaatgaattactatttcttacagggtggaaatggtccagtataatcaaactgccaccaaatgtctggctgttctctttaaagaaatgtgccttaccaagggtgcagcaatgggctatactgctgaaaggttggtcatttacaggagaagtatcttgattagacttgatgaaaaggagcccaagccattgggtccatgcttggcttccattcctgtcaccatgaccacttcattcatgttcatttctccaaaactggatggcacttataaaatgagtcatctagtctacttgggtgttgagatccaccgcaaaccagagtaatcagtggatactctctgatgagcattaacgtgagacacaaaggtccacagaatttgttcccactcccatacatatagccatatttgtttcctagactttcttgttctctgttttccaatagtattctttctaggccagtggtcaaccaggtaaattacttgctacttcttggtattccatgtatacccttgccacggttctttctcccttcatacaaaaagaatgattgctataatgctcacagatgaactgattgtgaagatttcccttcaccactatcctttagggccacccttgagtggggctgtaatgcagcagtagttcattttttttggctggcattagcttgtgccaatctgtaaagcagacaccaacctacgaactccatcaagtggtcatatggagctctccatgaagccaatttcagtgagagtgcagcagaaataagtgaagtgggagtctaggccacctattcatgaatttaccttccctttctagactttcttgatccagaatgtaaaatttctatcataaaatcaattgctgctgtgctcaccttattttatgtagtagaactggcaatacccaattcacaatgggcagctgtagtcacagagtcacttagtgtcccattgaagagatctcagtctctactagggcagaatagcatgtcaggaattattttcctcataaagggtatttctgtccttcagaaggcagatccttgctccaaaactttaagagcctgagctttcattctcttcttgggacctgctggcgagtccacagaatatccttgtccaggatggatatctgtagtgttgtaagacctgctgggctgggctgtgtggcccacatggcagggaagctggcatttcagcctgaatctgttatagactcttgtaggtcctacctgaaactggcagccttctgagttatctgataaaagggaaaatgggttacactgctgccaaaagccaagacgcccagcaagtgctgtacttctttgtaaaaggtagaaagggcaagatacaactatatgtcctataccttagaagggatttttttgtgagacagggtctcactctgtcacccagactgcagtgcagcagtagttcattttttggctggcattagcttggcttatggcaactgcctccaaggcccaagcaattaccctgcctcagcctcccaagtagctgggattacaggcacatgccactactgcccggctaatttttgtatttttagtagagacgggtggccaggttggtcttgaactcctgacctcaaatgacccacccacctcggcctcccaaagtgctgggattacaagcctgagccaccatacccggccagaagggattttttagaatgccacagactaagcatgttgctaatggaagaggtccctgaatctttgtgggatttatctgctgcccccaaccttcagatttcttactagactagctaggcttctttctactttttgcccaccaactctaattagcatatcatcaggtagcagaccagtatgatgatgtgcgtgatgtccagattatccgtccccacaaactcttatgaaatggaaccccttgagcaaagcagtgaattggtattgctattgttcctagataaaggtttactacttttgattctctctattgataggaatcaagaagagaacacattcaccagattgataatcacatataaagtgctacaggctgtgctgatgtgttccagtgaagacatatctggcacagcagctatgatagaacctacctattggttaagttgttaaaatgcattgtcattcaccttaatctatttgtttggggtttttgttggttttgtttcttacagggggcagataggtgaattgaaaggatatgaagcgccaccattctgcatcctttaagtctttcaagttgacactaatatctgcaatttatcctgggacatactcctatcagtataagctcaaaccttgtatccaatgatcttcaagaagtcttggatttctgtttaccagttgacagttactttggcaattggccacaggtcccttttaggaatgattgggggacagtcaccaataatacttgtagtggtatacactttccctacacttccctagggggatccagcaacacttttaatcaatgaattcctggttcctgagacattaaagttttaaaatatgtgcctcttaagatgatgaaatatagtaacttgatgtggttactatacacagtactagagggaagaattttccataacacaaatgtttagatttaaattcatgccttgaagccagataaatgaagtataagctataattacaaaacacctagttcttcagtgtttggatttatgaaaattgccatgattgttatctattgtgagttattaatccaagttacttttattacattttaacagttttagctataacataaattccatgggtttttgtttttgttttttgtactaccttaaaaaaacctatcattgttctgtggggtttttttgctcagttatgtgtttgtatcagctttatgcccagacccatactgtatgtcttcacatataatatctcagtgctcacagtggtcttccttgggaggtgtttgactctcatttacatgcaaaactgagacccagaaatgtcatcttttttgactcttatgtcacagctggtaagtgaaagagtcagaattcaaattcatgtctcctaactctaaacccaaagctccttctactattccatagctatcttcctaaatctggtctattttctctccctctccctcccctcctcctctctcagttgatgtgaaattcacacaatataaaattaaccattttcaagtataactaccattcagtggcatttagtacattcacaatagtgtacagccagcacctgtatctagttccaaaatattttcatcatctcaaaggggagctcgtgctgattaagcagtcattccccattccccactcctcccagcccctggaaaccaggaatctgctctccgtccacatgggtctacctattctggatattttgggtaaatggaatcctaccatatgtgacctttgtatctgacttctttcacttagcataatgctttcaagtgtcatctacattgtagggtgacaaagagtatgggcaatcagacaagtgacccaaagggaaaacagatgtaaacaggcctggctaaagcttgcagcaatttttggacaggttcgtttctaacacatcaatgtagatagcagccccattccatgctgtaataccttataccttagatacaaaaatctgaacatcaaaaaaatctgcgtacttggccgggcgctgtggctcacgcctgtaatcccagcactttgggaggccgaggcgggcggatcaagaggtcaggagatcgagaccatcctggctaacacagtgaaaccccgtctctactaaaaatacaaaaaattagccgggctaggtggcgggtgcctatagtcccagctactcgggaggctgaggcaggagaatggcgtgaaccccggggggcggagcctgcagtgagccgagatcgcgccactgcactcccgcccgggcgacagcgagactccgtctcaaaaaacacatctgtgtacttattctcagaggcttagagctaccaaacatactttcccgtgtcgaaaggttttaagagttcccatcttgggaaggaggctgtttctagccagttggcagaggaacactatgcatttatcccttctggatctcatggcaatcttaggcaacatttctagaaagcggcgacttaatagcaatgcatgaagccattattcataactcttttataagtcaatattcatgcaaagggcttttctctgttataaggaagctgaagaacaattctaacaatatcctatttctatcgatgtttcttataataatattggcttctataccttttttttaaatctccattaacaaatataaccaatgtgccaaggaagaaaatttgctgtgaattggaaaatgtttaaatgagagacataaattattcttcaccttatgtttaccagagcttacttctcggttatttttccccaacctgctttagatgtggaggcagaagaggtgtggtataattcttatctcccaccatcgccctgggtgggagattctatttactcaattcacagggtgaacaaactagtaagatctgtaaaatctgctctccccacaatgagtgattatacggagctcatgagctaatgctggtagcatgatgtaacagaatacgccttgatcacaggttagctattactaatgcggtggtaggtctgagagcctgtcagatgtggcctggtttaaccctcggtgtgagcattatatcaatttatggagggcaagcttccatgcagggaccatccagcagctgtttggcatcagggttgcacagctttattaggaagagcaacacttgtctacttttcaaaggggacattttaaagacttccaagagttcttatcttcttccagatatattcattcccagtagggtaaagggactgaaattctaactagggggtctctgtgccaatagagcacataaatctgtaagaaggatttatctgttctatgtcagagtttggctgaaaatcctgttagtactgccaaaccctccagatgcccatatttaatgcttggttggccttatgtagcataaccaaattgccatttcacaaccaccctcaatccctggaatctgaaacaacaaagccagaagctctgaaatgtgctttacgaagcatgaaagaatcttttaaggctctgtctgattcagttctgtgtgatgatagaaggtctaatgtacttgtgaaggattccttttactcataagaaacttggcactttacagaaagtatgtatttcatgaccaaaaaaatagggtggcttggagggattgtgctttctttttgtattgtatccaatatgttcagtatcaacagcagcaaaatagagaggaaaaatatctggtacaaagctatgtcagctaaaagtcatggtgacgagcagaggacagttttccactgaattcagggaaattattgcgtgactatgtgaaaggactacttacacagtaagagtggtaagtagaaatggacagtggaagtcaggagaccttccataagtcctaagaatcttagcaaggcacttaatcattctgtgtcttaccttttgtatctattaaaggaaaaccataagatggtcatgtcctatttcagagaactgttaggaagaccaaggacatcattgttcaaatgttcatggagctcttcctattcggggacaatcttccccattcagcagagtaagactatggcaggttattgtttgtcacatattttgaagaacacaaatgtattatacagggattctgaaggaacttgactattaaaacaaagcaacacaaatgaagtatttcannnnnnnnnnnnnnnnnnnnnnnnnnnnnnnnnnnnnnnnnnnnnnnnnnnnnnnnnnnnnnnnnnnnnnnnnnnnnnnnnnnnnnnnnnnnnnnnnnnnnnnnnnnnnnnnnnnnnnnnngttcataaggagctttctcatgttgctcttctgatttttttactccccattcaccatttagcttgggtgcaatctggcttttgcccccattacttaattgaaaaaggcgatgccaaaatcatattaacaacctatattgcaaaatcaaaaggacattttagatcctttcctaagttgaatgctcagtagcttttgtcactgctgactgcttcccttggttttctccacatcatactccttgattgcctggtgccttacttcaggtcttctgagcagcacaggaggcagggctgctgtttgcataatggggaggataccgagctgcttaggtgtgccaactgcactccttgcagcttaacagcaaatgctttttttttttttttttttttgagatggagtcttgctctgtcacccaggctggagtgcagtggcacaatctcggctcactgcaagctccgcctcccgggttcacaccattctcctgcctcagcctcccgagtagctgggactacaggcgcccgccaccacgcccggctaattttttgtatttttactagagacggggtttcaccatgttagccaggatggtctcaatctccttacctcgtgatccgcccgccttggcctcccaaagtgctgggattacaggcgtgagcaagtacattcttaaacgaagccctcacttccacaacagccacagcccaccccttgcaagatacagatctggttctccacatacctttggggaacaggttatccaggattccagtgggcctgtcttcctgaggagaagcttgaaagaggtaacttagggagtagtctgacccctgttgcagcggttggtctgtctgggatcacaattggtacttatcatttctcttccactgttcattttaaattccccctcagctttcacctctgctggtcttgatgacttatctgctgatatgatcaaagccttcatttttgagggcctgaacccatagttaccatacttttcttaggctggggttattgcacttgtttgtctatagtcacaattgagcaagtatgtccaactggatcatctgagttccaaatatatttctccctgtcctcattgtgtaacagcagccctgcttcttcttcctgatcagggtcagttactcctaacaagatattgacttctccttcagcctgctggtctctgtatacaagaagtcctgaatgcccaagtggcagtcatagcctgagttctccacagagcctagtattataggaagaggaaacacagactctttcagtgaatcattgaatgtgataagtggactctctcctgcttctgcccaatggttcccagaccaatatattcttcctaattgggataacatccatatagaggtttgtgatgcagtgtctagcctgcatgatgataccccaccatggcagatgccatgatgtaggcaattgcctactaattggcattccagttgtgcctttggtaggctcttgcattgctctatagagctacctttctctggattatgtgatatgtgataaaaccagaggatccatgggtcacaggctcattcgtctcctcctctgtgaagtgtgtctctcatggtcggatgctgtgttatatggaattctatgtctgtggatcactttcaaatcctccagctagtagtgctgcctgggactttgaaggtaagaaaggcaaacagttatctagaataaatgtttactaccatgacaataattcacaggtccttccaggaagaaatggctcaatgtgtcataaagtggccatgtgatccctggtgtactgctcaggtttgatccctggtataccactttccactagacaaattgctgctgagtctgcctgacattctgacttaatatattctacagagctcagctcacaaggggcagtttagaatgcgtagttactggcttccatggtcaaatattcagtctcaaacagggctaagtagcaccccaagagatgtttttctgcactgcagatggtgtggcctcactctagaaatccagaatactgtattttgattcttctatgaaggcttgccataaactccacaccacactacctcttttttcacttttcactcttccaacacaatagagtctatgagatcatatgacccaagaggcagggctgcttgtaccacagcctggtgctgcaaagtcctgctcaggccctattccaagttgccagacttacatgttaactgatatacatgggcgaagcaatctttctacagtattcaattcaatgaataaatcacagcttatttgtccattttcttagatataaacaaaagtataactcttaactgtaagttctgagtttagtcttcagctctttctaatatccccttgcaccagatataggccttctcatacagtgttcaattgcttgtcagttgctatcaactttatctcagcattagctgtctatagtagcttcaaacttaacaaaaatctagctaattccttcatccttgtattcattgctttccttcatcttccttgcttcctcctcaactacatccctccaacacacacacacacacacacacacgcacgtgcacttttctaaagcatgaacattgcacaggccaggaaagttttctcacagaactttcttccaagccatcattgattaaagtttttagtaattgggctgccaccctgtgccagagactatctgtgccccctgtgccacccagaatggcatcctcatcaccagcttgcaggaagtgatctgctcccaaaacctcattttacctcctgctttctcagaccaattccagtaccaactgtatcagttcagttattctgggaagcagatgctgagacagcgttaggagtgcaagtggttcattgaaagataacatctgtgaaagataaagggggagagccccagactgtgctacagagctgacaaaatcttggtcaaaccaatggggagctctacagcaaagactgcctgttagagggacccacattaggcatagaagccaggctctagcaccactgccatgctcagccctgggctgtgggcttcccaggaagagtagagccttggttaaaacactgtgaccgttcctgcaggtgctgcagatggaggctggcagctaactgcctcctgacagttacacagaaagctgtttcctggagggagatctgagtggtgcatctctgtggctgccatacccattttctttttcatcttctctgtttgcacatctgcctttctgtaccagcttctctttcttcctctacctatcatttaaataatgctggatggttttgaggttcttatctcatgccacacttctccagcctcgcctactcccattcatacatctaatgagattctaatgaatttgaatttcagatctgtaagccaggtctcttttctgagcactaaacttatttcatccaattgctcactaaaatatcatacagtgtccttatatttaacatttccaaaggtgacattattatcttcttggccaaaactatctgtatacccatctcagtgaatggatccatcagttacccggatgctcaaaacagcatagtcatctgcaacaacatggatgaacctggaggatatcatgttaagtgaaattggccagacacagaaagacaagtggtgcatgatctcatgcatacgtggagtctaacaacattgatctcatagaagcatcatgcatatgtggagtctaacatcatgcatatgtggagtctaacatcatgcatatgtggagtctaatgacattgatctcatagaagcagagagtaggatagtggttaccaaaggctgtgcagagggtagggggaggaagaaatgaggagaggttggtaaacaggtataaagttacagttaggtaggaggaataaattctgatgttctattgcacagtagggtgactatgttaacaatagtgtattgtatatttccaaatagctagaagagatgatgttgaatgttctcaccacaaagaaatgataaatgttggaggtgatggatttgcaaattactctgatttgatcattatacaatgtatacatgtatcaaaacagcataccgtattccaaaaatatgtgctaattaaaaataagagaaaactaaaaacataaaatcagtatttaaagacaaagaaaaacagacacataggattattcttgatactttcttctcactcatccctaatatcaaacccattattaattattactagtctaaatatatcttgaatctgtctccatttcatttgttttcatctgagttctcaccactaacatttttttccacctgaatggaaatggagtttcttttgttcttgctaaacacagcagtcagggtgatcagcctgtactgcggatggggtctcggtctcttgagtaaaatacgctattggcttccattgctcttcagaaaatttcagactcttcacgtggtttatgaagtccccgtgatctggccctgcttgcttctctttgcaggcagatcttttactagtttccctccacttcagtcacttctattatttcagccactttgaactatttttatattctagaattttatttcagccacttcgaactatttttacatcctagaatgtgtcattcactctgctgctcttattgcttgcacaagctattcctttttatgggaacattctttatttccactctttttttcctataattaacccttttccatctttaatgcatatgaaagcacaaaaatagcaatacagataactatgtgctaccatcaaaattaaccagaagttaacaattggctttaacttagctttctcttttattttttaaataaataaaatgttacagcaacaactaaagctctgccactatccactttttccttctctccccacgcagggattaagatagaattttactgtttttgtaccctctcttgctgttaagaaatctgccatcagctcagttatctttctcttgatgctttcatctttgacttttatttgcttttaaggtctctttgcctttaatgtttaacagttttcctgtaatatgtgtagatattgatgaatttttatttaccctgctttgaattcattgttctattttgaatgagaagttcttagccattatctctttaatattgtctgtcctcattttctctattcttttctcatgtgagtcctattagatgtaagttggatcatccatctttcattcttgccttttaacttctcttttgtgttttctaatatgatatctctctgtgctacattttatctggtttcttagctttacatacatttccaggccactattcttcagctaactactcttctgtctaatccatttctgttatatttcggttgtctgttctgcttcatatatctgttcatttttgtggttttgatcatgtcttttatgtcctgaattatttttttaaaaaacttattttataatcactttgaaatcattctattctctgtaattcttgggggtgtcagtttgaaaactgtgagatcttaatggctctttcatggtgaattgttacctttttattttataatttaggattataaattcatttatcattgagaaaatggctcaaggggagttccacaattgtttccaacagcaacatcagggatttcactgctcagggatatattttatgatactatctcagcttgggaggtgtctcagtcatccagtagtttaaatgccaaccaaaacacacaagtttatgggcaagggcatggttccagattctcaagaatgtttttttaaaaatagaatattgagtttgatgcagtggcgtcgggagcaggacgcctctttgccattcagatcatggggaaagcagtgggaatccaagtgaggagcagccagaggacaacagaggagaggaagggaggctgatgacctgggccctgggcctgtgaaggctgtgactcttctctagctagaggactcttcttttgtgggaaggatagcatcctctgaggacccctgctatgtgagcaggctgacataggtggtgatgaggtctgttcctttctagattcctgtggagatctgtaggtagctgttcactaggaagttaactaagaaagagaacaaaaaccattcatttagatccaaggtccatcaccgctggtagctgtggtggctttggattgtcggacgaccatcagcttcagcaggtctgcactagggaacaatcattcttccctagcccaagcgtgcctctgccctctgtatcattgacagaggctgcatgtttggcaagagaacatagtgactgctgaactgaaagttgactctaactctcgctaccaagtttttccctgacacagtgaaagagtattaagacatcaacctaggatacgttgagaaccaaggacaagatggacagggccaagtaactgggcttcaaccatgactgggaccaagaataagacaagagcccaggccaaagcagaaaagaggctgctatacaagctaaagctggagaagagagggaggctacgggtgtggttaggcctgtagccaatacctgggccaaagcaaaagacaagccagggtctctgacagatgcagtggcagagatgaaggcagtgactaagaacaaggtaggtgctgagacgaaggaaggagcccctgtcagagcctaaggctctgggcaaagccactggagatttcagtcccaaggctgggaatgagtccatcagctccacatataaaaatggggctggtattgatgcctgggtctgggctgaggaagaggccactatcaattcctggttctgaaatggagaagaggctggtaatcattccggtgctaagaatgataaacctgaaattggtgcccaggtctgtgctgaggagttggagcctgtgactggggccagttgcaaacctaggtctggggctgaggaagaggaggaagagaatgtcattgggaactggttttgggaaggagatgatgctagttttgaccctaatcctaaatctgcgaataggatagttagatctcagcctgtggatgaaattaatgaaaaaaaaaaataggcccaaggactggtctgaggtaactatctggcccaaagcccctgctgtaactccagcagtattcggattagatcccaggcatctgaggcaggccctccttcatatattgttttggcctcagctgaagaaaatgcctattctttgcctgtagcaacagcctgcccttctgggaacactaactcaagctcacagcccatccctgagtgtccttttggttccgacccttgaatccagaccatagatgagattagacgccaaatcaggattagggaggtaaatgggattaagccatttgcttgcccttgcaaaatggaatgctatgtggactctgaggaatttgaacaacttgctagcttacttaagtcaactactgatcctcttgttcataaaagagcacagattgcaatgggtatccataacgttcacccatttgcccaagagtttattaatgaaatggtataatgatgcttattgaaagcttgctcagttttccttccccggaaatgagaaaattactaattttcttatgagtaattactctgaatcctccttctggggatgaaagacaacgcaaaattgaattacatgttacgcatatgtgtaaagacaccatgtcatttcctttgaactcacctggacagcaatctggattaaagatactagggcaactgactactgattttgtccatcactacattgttgccagtgacttttcagagctttttcatttgccatccttgagaaagtaaaaaaccagacatcttgttttgaaagtaattttaaatatatctgaaaatccaactgcagccagagacatgatcaatatgaaggcactggcagcatcaaaactcatctttaaccataaagaggcaaaagccagtcttgttagtggtgtggccatatttattaacgtaaaggagcatatcagaaaggtctcaattgtagttgttgatcacttgagttataatacacttatgggcattctcagggacgttaaagggattattgaagcaatgtaaaatgagccagagatagaacactttgaaccatctccaaactctagcaggctgtacattcccaaagagccttgtatcatgttttgttattatggtgtacaagttatacattgcatctttaacacatagttacctgtgacaagctctaggtttgagctaaactattttgggggtaccagatgaatatcatatcactggctgaaaatgtttgttgatttttatcttgtttagattggcatatttttaacattttatttaagatagcgaaccagttcactgtaagtgagctaacttgttcattagtatcgccttagatccatctgtggcttaaaatggcaaaaaagaaaacatccttgaatttgtaatctagttatagaagtaaggcatacacacacacaaagataactaacagtacctagagagagagtgagtgtgtgtgtgtgtgtgagtgtgcacgtgtatacccatgaccaaatgtgcactccgtacataaaggaggcaggggttgctataggctgtttaatgtaagagaaactactatttttctcctattccagctgtatcagatactcattccacaacacagaaagatccagaatttcagacaaaatgtattatttgttcaattttaattttgcttctacatttataactcttaaattgtcaggctgtttcatttatgtcaaagtcatctcacaaaagaggaggtggaaacattttgtgagtgcctattctatgtcagacactgagttggcaccatattttgcaagtttatttttttcctgtactcacagtgatcctgtaaactaggtactcgtgtttttaaaagaactcattagtctgggtaccctccagtgagaattagagagggtaaatactttttcctagattcccacagcaggcaggtggcatagctgttttatctgacaccagaacccatctcaccatactcctttacagtccccctgaaggacattttgaggtgatggccttcaaagctcagagactggttttaacgtttaattttgcaatggaggatgtccatgccaggttacaattcttaacttcctccacatgcatgtgtccattagacatttggctgcatctggctggaggtcagctgaaaagtctgagatgaatagatggattttatctggcagtgtcagaaaaatagtaggtgccccacactttgttcagtgagtaagatggagatttggagtcatcagcaaggggaacttgttagatgtcctttgcatctttttctatccatttgtactttatcttccccaaagagctgaaatcatcctgtacattgttttatatcctgaattaaaaaggtaattgcttttggccgggagcggtggctcaagcctgtaatcctagcactttgggaagccgaggcgggtggatcacgaggtcaggagatcgagaccatcctggctaacatggtgaaaccccgtttctactaaaaatacaaaaaattaggtggccggcgcgtgtagcgggcaccgtactccagctgtcaggagggtgaggcaggagaacggcggaacccgggaggcggagcttgcagtgggcggagatcgcgccactgcactccagcctgggcgacagagcgagactacgtctcaaaaaacaaaccaaaaagaaaaaggtaattgcttttttcctccttgcaaaatcatgccttaattttttttatcatttgtgatttattctcctatgtgtcctatgaaaggccaaagggctttatcttttactagtaggcaagcctgggcatttctgcatttgtaccggctaacacgacagaataaatgtaatcggagaaatttagatccagaattgcagcttcaacaatacaaaacagcaaagctacaagaggctgctgtgccaatctacaagatagtgattcttagtcgttggtatggaccagaaagcatgcccaggacgtttaggttatggctgaattctctaagacccatggtgggaattataatccctagtctgagctgaaacggaagtttctatgtgtgaaaatatggggtaatatgctttgaggttttctgacagttaagaaactaaaacaagatcatactgtaaatatgtatggaacttgcttccccccagttgtgtattgtaaacatctttgcatgtcaataaatatgcctctataacaacaacaacaacaaaatagaatagatacaagggacatgcaaactttggtcagtgggaagatctttgctgactcacattttcattaagtgtatatagcattttgacattcctcattttgtagcaatatcttaattccaactcttcctgtcacatgtgctgacatctcttcttacctagtgtcagcattaaaatccaaactctcagcatcctgaggctggcgattccttccccatgatcatctttctacttcttgagcattcacagagcttgttagtctgtgttcagttctttcataatatctggggagttcctggatttctagagagttcaggtattcgtttgaaataattgttatgttttatctaacatttatcagtggtcatagtgggaagttttggggattatgtagacttccaggaaggcttcatctttcagttcctagattattcattgcccagatatttattgtcttggggactatattgggtattgaagagagttggtaaaaaatacagatagagagagagagatagagatagagatagatcctacactattaactttacaataaaattagacatcagtttctccaggaggctttctctaacttttctcaaatctcaaaattagctattatacgtagctaactcactgtatatttcctcattctgtcattctttttttttgtttgttttttgtttgtttgttttttgagacagagtttcgctcttgttgcctaggctggagtgtaatggcgcagtctcggctcactgtaacctctccctcctgggtccaggcgattctcctgtctcagccttccaagtagctgagattacaggcgcccatcaccacttcctgctaatttttgtatttttagtagagatggggtttcatcctgttggccaggctggtctcaaacacttgacctcaggtgatctgcccgccttggcgtcccaaagtgctgggattacaggcgtgagccactgctcccggcctcattctatcattctatcacactattttaattatatgttaatttgtctgtatcatcttcaagattataacttctgagaaaatggtaaagcatgtccttctgattagttattccacagtgtcttgcacaaagtccaccacattgcagaaaaaagattattgctgaacacagttgcttcagaaagtacttgagaattttcagtatcttttaagaaaattcaattagcctgtttttcccaacattcgtgcactatcgacccttcctttttctcaagtttgttctcctctgtatgtaaattatctcaagcctcctgtatccttaaaaacaaagaaaaaaaggaaacagtaataccttccctagtttcctggatctaaggattgtattctgtatctccttctgtcaaatattacacagtttaccattcctgcatttataagctcttttaaaagccagccaaagcaatcctggtgcttcccagatgccagttccacaggaatattggtcccccatgaggcaatttgctaaagcactctggctctttcctgatgtctgcacttatgactcatggctgatttgattacttcccagtgactccctgaatcctttgcttgtttctatacttcaacgctagttcaattttcttacattaattatgttttaagcattaattatgttttaggcttgattcaagtcttatgctgcatcccacactttttaaaaaattaaaaaacaaaacctttttattgcatcccatgcttttaattgacagctcaattcacctgggatttctccatcaggtcacgcagctctgaaagctctctattgcccccttctggtagctggcagactagctcctcaattagcttacatcgtcaatgctaaccttgttgcttgatgttgctatgcctcagatactagtatcttcctttctttcctatattcttcactgccgctgtttcttcatcatctatttattcctcattcctttcagactgacttctgctgcctccagccttctaccaaaacttgccatcccattgatacaaggccctctcaagtcttccggatgatctctgtatatgaaaatattgcccttccctttcctacttgccccaacactttattctaagaacttgaaattctattagaaattatctactctaggagtcttcaaatttgacaacagattaaaattgccaggacaacttaaaaatactgtttcctgggcccccttcctgaaaattctcaccttttaggtctgaggtagaggtctcttttgacctattgtcagcattaaaatccaaactcccatttgaactttaatttaaatgtatttattcagttaggtaaatcatgcattgggtaaaaatttaaacaatacttaaatccacccttcctgtataagtgttcttacaagctatagagaaatacctgagactgggtaattgataaagaaaagaggtgtatttggcacagagttatgcaacctgtacaggaagcatgatgctggcatctacttggcttctggggaagcctcaggaaacttacaattatggcagaaggtgaaggggaagtaggcgtggaggaagggggtggggaagtgccacacacttttaaatgaccagatttcatgagagctcactcactgtcaagagaacagcacgacaggggatatctactcaccacgatctaatcacctcccaccaggccccacctccaacattgaggattacaatttgacctgagatttggacagggacacagatccaaaccatatcacttccccttagtttccttacatttcctctcctaaggcaatccttgttaacagtttcttaaggatccatgtaggcacaaattccatattctaaagacatgtctcaactgatttggatgcatttggtccactaagcttgaggagcctctgatttaattcacccctctcatcttccttgaaatcctttcatccttcaacatcctttatgctgattgtcgaacatctctgatagtttgattctgtcttcttggtccacacctcctactttttctgactgtttcatgtgggcattccccaaactactccccttgatcttcttttctgtctatattttctttcttgacacatctctccagacctatgagtcactcacagaatatattcatatcacttgcgccaacatctcaagctagccacacaccagtattttttctaccagttagacatttctgtctagttgtctgggagcacctcaaattcagcacccaaaatgaactcacctttctgttaacaaaactacttatgcttctcttttccccattgtccttacttctgttatcattgactcttcctcggcctcttttatgttaattgcaccttgaaatgacccacacttcctttccctccacttcagtttcgtttgttacagcattttttacactagcttcacttgtggttaccacttccctgcccactgctcataagccccttgaggattcttcagggcagcaactatattttctttatttctatgttctcggcacctcactcattctctcatagtaggtgttccatagatatgttgggtcaatgaatatccgttaaagctcaaatttttaacatggcagtcgacatcttccatttctgatttaccaacctttttaatttagataacttaatttacacctcgccacaaccaaactgaactattcacagctctcctgaatgcacattgcaatcttccttttgcacttctttgtttatgcttttctttctgcttgaaattctcatctgctccctgcctatcaaaatcctacaaatccctcaagtctcagatcaaatgccttattcttcccaaaggcttcccaaatccttaagtcctgggttcccacagcgtgtggattgcactttagtctcacttctattcaactaaatttataaaatcatcggattttagttgtgaaagacactttagaggttcggattttagttgtggaagacattttagaggttacctaagacaaccctgtattttacagctaagggaactgagacccagaaagagtaaatgtcttgctcaagattaaatatcagccagcgaccaatggagccagacctagaacccaactctcctgaattgttttccagagctatgctgcctatgcaattgttttagcttctcttccggaccattagtgccaaaagtcaaggattaaattttattcagctttaattccttataatatccaatatagcacctttcatatagtaggttcacaaaagctatactggattgaaatgaacatttaatgtactggttaatagatatttttagccagagttccctggaaaacagagtgtgaggcagagattacttgctgatgtgagagtaaggagaaagaaaaggcaggaaaggctaagggacaatgcagtgactgctgcttcccagcgaacctggaaacccagcaaggaatgtggcaagtggtctgtacatccaagcaaggtatctgtggccaggctgtatggacccatgccttggggcagttcataataagcaacttactgtccccatatcgtctcatatcttttttcccaccgatcagagttactcccctgcacttccagttctgtcatctggcccctttgatggctctttggaaagccagattccatgccctgcgggaaggttcttcggttgagtccagagtggaagaggatgcaaataagatatgtccaataaaaaaagctttgaacctacacctgttacttaaccctgttacttgagattgttcttattttggtttttgaaatccattgatgttggaaacacaaaactggtgatggctttctttaagagacaggctgaaacagaaatttttttttttacacggagtttcgctcttgttgcccaggctggagcacaatggcacagtcttggcttaccgcaacctccgcctcctgggttcaagcgattctcctgcctcagccttcccagtagctgggattacaggtgcccaccaccactcctggctaatttttgtattgttagtagagacggggtttcaccatgttggccaggctggtctcgaactcctgacctcaggtgatccacccacctcggcctcccaaaatgctgagattacaggcatgagccactgcgcctggctgaaacagataattttgaaatgttttgtgcaagttaacagtgacattcatgaagagaatgataaaagtacagcttgaataagttctgatttttctctcttaagaattatgtgcaaatccatacatgacttttaaaaatcatcagatttcaatgttttctcatatgatgttatgattctacattaaaagaactataaactcttctaattaaattactcaagatagtgcaaaagaatccatgactctttgtcctcagatataactcataccctaaatgcaagttgttcaccagtgcacatgacaaaaaacacctaagtagggggaagaattctttctttcagacaagtggttttacctactttaaaaaaagccttgaaaacttggacacccttcaagagcctctgaatatttttcttcagcagaaattccagcccagatgttcaataactcaggtttgttttaaaagaggaaatagagagacaaatttttgtaaagggcaaaatttgaaagcaattaatggtgacatgtccaagaattttgcttcattttattattaacgcaaccattctttccaaattttattgtcagatattggagaagagaggggaaaaaagtctgggaattggagataaaattcaacattaaaggagatattttaaatcccagtcaagaggaaaggaagagttgatggctaagctgactgccaaaagacattgtaaagttaccagataacaacaagtgataatagaagggcctagggaagttctgctcatagacttcaaacttggaaaggtgtcctgcagaccaaaacctgctgacctagcagtggcaaagttgccttaaatgaattcacaccgacaagcctggagggattgtctcttcatgctaaagtgatttggtcatacatatctgagggcactaggtgaaatttctggagaatcttggaaaataagtgtgggaccagaaagatagaatcactttgttctggtttactttaaaaggataaaaggtgcttttcatttgctggatcacttaaatgctctaagcctctggttctcctataaactggggactatttactagccccatttatttaccagaattgttttgataatttaaaaaaaaagatatgcaagctaatcataaattctaaatcaatataaaaatgggctgggcgtggtggctcacgcctgtaatcccagcactttgggaggccgaggcgggcagatcacgaggtcaagagatcaaaaccatcctggccaacatggtgaaaccctgtctctactaaaaatacaaaaattagctgggcatggtggcacatgccagtagtcctagctacttgggaggctgagtcaggagaatcccttgaacccacgaggcagaggttgcagtgagacgagatcatgccactgcacagagagactggcgacagagagactctatctcaaaaaaaaaaaaaaaaaaagatagtgaatgactatttaagtcccttcttctttccattttcattgcactttacacatactactgttgtagatcttactgtgttgcatgatggagaggtttatgtccagtttcccaactggaatgtgagatactcaagaggacagacgtcaacttatttttcatatgacccccccaaacccaaaacaaggattagcatttaatgagtgcttaacaaatgcttgctgaatgcagcaagattaaaaaataatctcagcagactgtgctgcaaaacagaattgcaagatgatacctaagataaatataaaccctacatttgactctaaataataaattgcacaattattggattgtaaagtcctagtccagaggtcatggtaaaaacatctgggagctgcagttaactataaaaacagacaagagaccgatgaagcttctaaaaatattaacttattaatactagcatagaatcatgggaaatgatgggaaccaagagaaatgatagtctcactgcgttccttgtgggtcaaattacattttaagaggaattgataaactagagtaaattcaggtgactccatctaataggatagacagtaccccatgctataccaaaacgagttaaaagagctcaagtagggctctggggaagagaaaaataaaatacagatttgagctgtcttcagttatttgaaggagatccagtgttgtcccagtaggcaaaacttagaccaaaaaaattttactcccaaatttgattatcacatatcagatttggattcagtaagaagaactattctaaagatcacagctgttcaacaatggaatggactcctctggacggtagagagattgtgtcacacaatacctggggcttagacatttcttgtaatcctgtctgtacttagcatagctctggacacacaatccatagtcactaaatatttttcacagattgatactagggaaaataataatatttaactatgggtatatgcctactctgcccagtaatgtttagtattgaaccagaggtctagattagtgatctccagatttaattcattatatactcctatcagtaaagtttttgaacaggtactcctaatatatacatttatttataaattctatactatactactctactaatcgtcatatcaaatacatgtttataaaacaaaaataatgtaagggcaaaaatatgagataaagaaaaataaatgttaatgtgttttctttctgcacaccaatggatcatcatggccaccccactttgcagagaactggtctataattaagggacttaacatctgcctaaatacctggatattttaggcccttctgagtctgaatgatctacatatcaatcttaattttttcatttctcttttcccatgtagacaaaaacaggattaaaaaaaaggttaagcgatgttctaccatttctatacagttgacctttgagcaacacaagtttgaacttcacaggtccacttatatgaggattttttttcaataaaagtaacactgagtatgctgcctcttctgcatccccttgcacatcctccatctcttccatctctgacacagtgagacagcaagaccaacccctcctcttccttttcctccttagcctactcaacatgaagataacaaggatggggacctttatgatgagtcacttccacttaatgaatagtaaatatagtttctcttccttatgattttcttaataatgttttcttttttttctagcttactttattgtaaaagtacagtttgcaatacatatgcaaaaaaagtcttcactgactgtttatgttatcagtaaggtctctagtcagcagtaggctattagtaatcactttaaaaagccacttatagattcaatgctattcccattaaactacctttgacattcttcacagaactagtgaaaaaaaaaactatttaaaaatttatatgaaaccatagaagagaccaaatagccaaggcaatcctaagcaaaaagaacaaagctggaagcatcacgctacccaacttcaaactatactacagggttacggtaaccaaaacagcctgatacttgtaaaagaacgaacacatagaccaatggaacagaataaagaacctagaaataagaccacacacatacaactatttgatctttgacaaaccaagcaaaagcaagcaatgaagaaaggattccctgttcaataaatggtgctgagatatctggctagccacatgcagaagattgaaactgaaccctctccttacacaatatacaaaaattaactcaaaatggattaaagacttaaatgtaaaacccaaaactataaaaaccttggaagacaacctagcaagtaccattcaggacataggcacgggcaaagatttcatgacaaacatgccaaaaacaattgcaacaaaagcgaaaattgacaaatagaatctaattaaactaatgtgcttcaatttactttgttgagagtataaaaaacactatcaacagagtaaacaggcaacctacagaatgggagaaaaaattcgcaaactatgcatctgacaaaggtctaatatccagcatctataatggacttaaatttacaaagaaaaaataaataaccccattaaaaggtgggcaaaggacatgaagacatacatgtggccaaaaatcacatgaaaaaaagtgccacatcactgattattggagaaatgcaaaccaaaaccacaatgaggtaccatctcatggcagtcagaatggctattaaaagttaaaagaaatgcttttaccctgttgggagtataaattaattcagccattgtggaagacaacgtggtgattcctcaaagacctaaagacagaaataccattcaacccagcaatcccattactggatatatacccacaggaatataaataattctattataaagacacatgtgtatgtttatttcagcactattcagaatagcaaagacatggagtcaacctaaatgtccatcagtgatagactggattaggaaaatgtggtacatatacactatggaatactatgcagccataaaaaagaatgagatcatgttcttcgcagggacatggatggagctggaggtcattatcctcagcaaaccaacacaggaacagaaaatcaaatcccatatattctcacttataagtgggagttaaattatgagaacacatgaatgcatagagtgaacagtacacattggggcattttagaggctggaggatgggaggagggagaggattaggaaaaacaactaatgggtactaggcttcatacctgggtgatgaaataatctgtacaacaaactcccatgacacaagtttacctgtgtaacaaacctgcacttgtacccctgaacttaaaataaaagttaaaaaaaaaaagaataaagggtagcaaacacaccttcttgctacaaaagaaaaaaacagtaggctattagtagttaagttttggggtagtcaaaagttatgtgcaaatttttgattatgccattgtcgacactcctaaacccctccattgtcaagggtgaactgtatatgtttttgtaagtcttttatgaaaatatttttaaatgtcagttttttgttgaccctgcatgattgtgatagaatttttctacctcgtgtctccaaaacagatgttgttcccttataattataatacattttacaaaatcgcaactgcagagtgttttgttgaagtgatcatcttaaatgaatgcatgggcagtaaccggatcaatcattcttactcctgtcaagctttcaattacattccagagtcccaacacaaacctagcagcttgttggaacatctagatgccctttgcttctagatcctccctctttcctcccagatttggattacctttaaatgagctattatctgatatgatgccacagtttccatgattcgtattcatttttttaaaactttcgtctatgatctagtaagtgacgatgactggtttattgcaaaattttctgaatcactttgctctgtcagattaagctttcagctaaccagcagagggagcacaaagagacacactggtttcatctcagtgtacagggagtctagttactaagtggacgaagaactcccgcacattgagatctggtcctcaatggcaagaagcactgttcgagcaatcaggaaaatctgggctttaagcagtggcaccactacgaatttattctcttgcctaagattacttggaattcctatagtagtgggggaggggggactctcttttgtactagttcctccttaaattttaaagaaattgagcccgtggactgaggtgggtgcggatggtgggatgcagaggaaacaaaaatttcttctcatctagcttccactccaaatctgtttctcccagagaaaatacaagacttaggagtgctgtatgaagtctcttgctgctctattctctaggaaacctaatatgaaatcattaagctactgaatgtcagtttcttcaacagtaaagaagatacattattattgctgttattattactactactactaccaccaccaccactaccaccattgctattcatttagtgacttctgttttctctacttaatctcacttattcagcatatcagccctaagaggcagattttattgctcccattttacagatgaggaactggaggcttaaagaggttgaagaactcaaccaatgtcaagcaactagaaaggaaacttgaacaaggtgtctctgattccaaagctccatgcttttcatctgtgttggtaataaaaagaataataccatatcacagttatattgtacattacaaagcactttaacctttatcatccccacctcaggataattctgtgagctaaacacggacaaatagtaacattcacccctccctatctctctttacctctttagctcctatttttaaaaaacaagcaattaagggaactaaagcttacaaaatgtaaaggattcttctaaggtcacatagatgaaaaatggatttgggattaaatgggttttattcctgtagttgccacatcacactgctttgccacatagagaggaagagacctagctttgcctccaactagctcttttaccctaaaatgatcatttcaaccctggagttcttgcatatacaaaatagatgggagtaacaataataattaatacttatgttaacaacctcacggtattcacaaagatcaaatgaaatacggagatagttatgaaataagtaaataatatacagacaagtatagttctattgtaagattatcctgggtgttagaaactaggttatgtctgacttctggcaaaattacaggacagggcaggttagtgtctaatctgcctacttcccaatccccaggtagctgttgcctgaaaaggcatcggaagatacttaagagataggagattgttcatatttacttaattttttggatgagactgtttgtctggactgtcccatgagatggtatttacctacttgggaagctcattctcccatttgggacttggaagcattctcattgtacaacagtgagagctggaatgccattacatcattatgaaccacccagtgcccatttgatatagttaataacaaggattaatgaagtaatttaaaaggaagaaatagaatccttgccctgatccaagacaaagggacaaaaaaaatttctttctgaaatttgagggaaaaatgtgtggttgcttctattaagaaactgcctgagaaaagtcacagtgtgtgtgttatgtgggaaataagagtattggggcaggcaatcattcatatgttagatttctttgttcagatcaatattgtttgagtgctaacactgtggtaggtgctggaaatcgaatgctgaacagaacagataagttgcccacactttcatggaatttgcattttagacagacagccaacaatgatcaaataattacatgtttggtgggtgttacaaaggagaaaaacagacttccattatgacctcttatgtaatcacactgcaatatcttgaagttattacttataaagatcaagcagaagctactgctgcatactagagaactttaaatgatttccaacatcgagaaacttgaatttcttaaggagtagttattataaaaagaaactggaatggctaatcttggctgtctctctgaagccaatataaagaaaatgagtgatacccaacattatcttgacctcactgacaactagatagcctaagaaacagtgtgtgcaatagagtagaaggaagaatcaaaggacatattttataaggataatgagttctgctttcttttcctcttctgggctataataatttttgtctcttttgtaatcataccctcttggaaagccactggcttggactgatttatgcctactacagatttttccttccaaaagtacatctccatgactaaggaaatgggctgtctcaggttggctggttccatcaagaacacttaaaacttgattgcactattgtaaaaccaactggggtcttagcatcaacttgcattttctcattggcatccaattttgaggatatcatattgcttggagaagaaagaggcagtagttattataatttccatggacttacagagttttagagacttgaatatcgtgtactttaacctcacacccagtgtaagaatctcctatacctgattcatgatattcatcttttgaatacatagggtaaaaagagcttactctctcatttttgaagaattctgttattcttttttatattggagaaactctaccaccattagtcttagatatgttcaccagagccatcatggaccaaatcagaagtaatcatttctacttaaagactttcctcctcttcaccactaacaagtcttttctcttctaggctaaacattccaggtttttcctccattctgtataccacatgatcctccaaattgctcccattttggatgatggagcttgaggaggtggaagatcaaaatgttagtgtgtgttatctaacatatttgctctttctctcagttttgtaacattagcaggtttgatcaatatttcacctgtgctgcaattcacattgataattaaactatacagggttgctttaattataaagctaaaagtggatttttttccattaacattgccagataggatgatttgccaactcgttctctgggtctagaaaatacccaatgaagtcatattgactctaaaatcaagctctggatgtgaagatgctgccatgctgttgagtcaaaagaatatattatttttgatttctgttagaccagtaattttagtaactttggcaaaaggaatataaaaacaagcaatctccaatttatagggctgcactgtagaagtcatttgtttggaatgtatttcacatgagtattaaatttttggggaagactaccaaattttttttctttttttttttttttttttttttgagacagactcttgctctgtcacccaggctggagtgcagtggcatgatcttggctcactgcaacttccacctcccgggttcaagcgattctccagcctcagactcccgagtagctgggactacaggcgcatgccaccacacctggctaattttttgtattttagtagagacagggtttcaccatgttgcccaggctggtctcgaactcctgagctcaggcaatccgcccgccttggcctctcaaagtgctgggattacaggcgtgagccatcgcccctggccaaaatttttaactcctaagacaactgacattgtaataccaccccagaaatcagttgcaaaccagaatgtcatttcaggttctttaacttaacatgtaccataagcaccactagaaatatttagacatctagcacgatgtttaacaatgtttttctggattcggatgaccaggatcactgctgggaacaccaggaatattttcatgcttttattctcctatccaattgagttaaggatccccggccccacatctgctgaataaagaaaactgggatccttgtggcctgaatctggtggtggctgggaaggttaagatgcagtgatagatgctacagagcttctggaagaaagcctgcctaccactggggtatactcctcagtcttcatgggtcgcagtcagactcccattctctctttccctccacatcagcctgattcatagcctcttcgtactcattctctctctctcctcctactctctcttcctcaggggtcatgacaaaatcttccagttttgtttcacttatcccttaagcactctccaatgctttaacagttttctaaggtttgtttttcccctgctgggtagctaatgaattaattaagaggggaatattgctagttgcaaaagggaagtggggtctatagaggatctctccagtggcagcctctgtctctcaatctctctcccattctgtctcacttacagctggcagggagaggcagaatcacctgcagatgctgcctgtgggctgagtaaaatgcaccaacttttcaaggaaaagcaaggacaggcgattctaggccttaagggaaagatggtgaggtaggtctgacatctggcctttgatgagaacacagaacggtacttctttgtgggagttgggagtgagaagctgggaactaacttttatttttttttaactcttaattgcatttattttatgctgaatttattcccatgccataagttttcgtttcttcagtttcttttgagatatcttttttttccttatgtgcaacagaaatatcatatgttgcagaaatatcagcacaaaagaaacttactgaatccttactgaaaaggaacagattgttccagattacttctcttcaggtttaggaaaaatttgttccttttcagtaaggatcatcttgatgtggcagggagagtacatgcatgggttaatccgaccatgagctctataaggccagtagcaaatcttaggtgctttatttacctgggtatgctcaatgacctgagaatctacatctacacccttaagttcggcatttctctcagcatttataaacatgcagcaaaaattcagcactcattttgggccaccaaccctgtgtccagccccactgcttggcctgggcactaccaactcccccattgtaacgtcagaatggtacacactgtttctgtgaagtgacatctttcggatacttggtggcttttcatataggcacacccttgttggcctgggcagtttcacgagtgttcttacaggaaacacaactatttgaaattcttgatttgcctgattttgaggggttttctgggtcgagtgaacagaaaactattttcacagatcacctcaggccacttaggggaagagtgggactaactttcttgatgttgcttttgcctgccttctcttttcacaaaggaacagatgttcctttcaccaatctttcaccgtcattcatttttcttcctccccttctaagacacacttggctattgcagaaacacagttccttaaacacaagtccaaaattcaaacagctctgaacattgaaagtttttggcaacctacattgcagcagaatttggcccaagctgacatgaggtgatatcatctttatttactcacatatttactacaaaaatatcaattatcaatgggattgtttcaaagtacagccccagttcctgcttgagtataatcaaacatatgtatattacctttctaaaatctgaaaatttttgaattctgaaatacatctggccccaaaagtttctaggtaagggattatagccctttatttcctgttttcctacatctttctctttccagctaagtgtaaaagagcatagactctggtaacccaagctgaattcaaatcctatatctaaatatcagttgtgtgtgattttgctctgtttacttaagccgtctgtgcttcagtttccccatttgtaaaatagggataatagtattacctatctcaatgttgttgtgaagatttaattgagttaatctatgtaaagtgcttacagtaatctctagcacatagtaagcactataggtttgctattatcatcaaccttaatccttcactctacccaaaaatattacctaatgtcccaattataaaatccctgctcttcgccctattccctccatagttaaccctctatccattttcttccactcatgccataaacagaaaaccatttgtcattagttaccattgactactcttcaactggctgaaatctggtttgctatcctatttctcaactccatggtaatttctctcattaaggtccctaatgcctcttaactgccagtttaaaagactgctgtttagtttcttttgtgctgttatttctgcaacatataatatttctgtgacaaacagactcggttctccttctacttcattttcattctactgctccggtgactcgctcattaaaggttgacctccccacgtgtttcatcctttgtcctttttgtacagtacacatgctccttagaaaaatctcatccaatttaaagtgtcagctatcacctggataataatgactgccacattttatcattagccctgacctcttccttgtgcttcagactacatttcctatttgcctcctgtgtccagccccaccacttgacctgggcactaccaattcccccattgtaatgtcagaatggtgcacgctgtttttgtgaagtgacatctttcggatacttggtggcttttcatatatgcacacccttgatggcctgggcagtctcacaagtgttcttaaaggaaacacaaatatttgaaactcttgatttgcctgattttgaggggttttctgggtcgagtgaatagcaaaccattttcacagatccatctccacttggatgacctgcaggaatctcaaatgtaatatatcccaacgaaatgtatgatcttctccctgacatcctgcccctaacccccattcgagcccccaaagtaatctcacaacatgtatgttttttcatttttaatctcagttttaatggctttgcacacttcacctattagcttaggccagaaatgttgaatcttcattcgtctttaacttccacattcaatcagtcactaaatcccgccaatttgtttttagtaacatcgccagaacctgcctactgatttactaagggcttgtactaactatcatgtagaccagtggcttgacctttttgcccataacccatggtataaaatatattttacattgtgccctgggatatagacatgtttatgtacatctgtgctctattttatttcatttcacttttctaaaattatggttatgataccctaaattgattttacaatctaccaatgggttacaatttgcagtttaaaacaccctgacctcaaataatagcactttactcgtctcccctctcccgaccccagtgggtcaatagatagcacttcagaggttgtgtaccaaaacccttaaaggcggggattgtaatctgccaaaggaaatactcccaagaaggtgattctgatatctcctatatgttctactcagttatcaagacaatactgaatatttcttagacatgtactatacataaagcacacagctgtggctcaaataaggatggttcactgatttggcactcacatttacatgaacttggaaccctcaaaagcccttaatgctccatgtattttcacacctccattgacactgcacatactattccccttgcctggagtgtcctccatactccctttcatcaggcagatgcccatctgtagcaatgtatacaaaaatctatttatttaccaaagacagttaggtagcagaggggtagtagtggtactgggcccagtttatgtccctctccagttactctgtttcctggtcacaatggtcccagcaaccgccatggtcattgctgccagctcactccacaaagtctgtcacaatagcctgcccctcactctttgatttgctgactcagaaatactggaagtcacattcatggtttatttaaacaaggaaaaacatacgtatgagcaggatgccccacaggtgttaacaaccacatggccttctgattaagaaagtttccatccttggatactcatggttttctccccatttctctcctacctaggaaatataatatgaggaaggcactgttaggatccccaccttaagggtgagggaactggggcataaagagattgcgtgattattgcaaggcacttaaccaatatgcagcagagcctatagtttgaaaacatctctggagatgaaaatatgctccttttctctcctataatatttactggaaaaagactacaaatccaatttgtacttgtctacgcactggtcctgtttctcctgacttctcatgaaggggactcaagcctttgtgtgtgtgtgtgtgtgtgcatgtgcacatgcatgtgtatctctgtgtgtgtactctcaatcagcactctaaaatatattggcactctgaaatatatgtgtatttatgcatgttttataggcacatattactgtataatgtaccatgtaaattataaaacaaacacacaaaaacataaattcaaaaagcatgaatttttaaaattataagagaaagttctaatattttttctgcactccccagtatattatcttggatactgtattttggagacctgccataaagtatcatacttagtagaaaaacatattttctttcatatacaggaaaaatattgatccacaatcaatattgttcacagggttgcttctcaagctgtggtgttgtctgaatgtcatatcccccaggatgccattcaagacaagcatttgcagttttgagatggctaattctaattaggaaagcagactgccaccacaggttataatctgactaatgtgttcttggaaccacggagctactgaagttttcgggtatgatgtcagtaaggagtgatgaaaggaggactggattaacagcagataaaagttctaaataatttgacctctgcttaaaatagcgatgggccttgaacaaaacatttaatagtaacgggtcctttgattaaattgcttttgcatgtatttaatattaattccactgatatgatactaaccctaagaaataagcatggctgatactagcccttaattttatatcataaataagcaaaatcttaaagagagtaaatgacttgcccacacagtaagaggcataactgggcttcacaatggtatttttgactcatgtattatcttaccttgcttaacctctttgggcttcatgcctttaaaataaactttctgttttagaacagttttaggttttaaaaaaagttgtgaagatggtccaggtagttcccatatactttacacgcattttcccctatgtattcgcttgctagtgctgctgtcacaaagccccacagactgggtggcttaaacaacaacagtttattttctctcagttctggaggctataagtccaagatcaaggtgtagaccaagatcaagaggcttttctggggcatctctccttctcttgcccatggcctccttcttgctgtgttctcacatggttttgtctctgtcctgatctcctcttcttatcaaggacaccagtcaatttggattagggcccaccccaatgacctcattttaactaaactacctctttcagggccctatttccaaatatagtcaattttttttttttttttaatctgagtcttgctctgtcaccaggcgagagtgcagtggtgcaatcttggctcactgcaacctccgactccctggttcaagcaattctcctgcctcagcctcccgaatagctgggattacaggcatgcaccaccatgcccagctaatttttgtatttttttagtagaaatggggtttcaccatgttgcccaggatggtctccatctcctgacctcgtgatctgcccgcctcggtctcccaaggtgctgggattacaggcgtgagttaacattcctggccccaaatatagtcactttctgaggtactggggttaggactccaatatataaatttggatgggaacacaagttagcccctaacaccttattattaatgctttacattagtatatttatcacaatcaataaacaaatattgatacattattattaactgaagtccatatcttatttagatttccttcattttcacctaacaaactttttcagtcccagatgctatccaggataccacattacattttgtcactgttacatatttaaatgtttgcgtcctctcaaaattcatgttgaagttctaaccctaatgtgatgttatctggagatggggtctttggagggaattagatttatatgaggtcatgaggattagtgtcctataagaagaggaagagaaaccagagcttgatttatactgacaccttgatcttagactgtccaacctccaaaactgtaagaaacaaatgtctgctgcttaagccattcagtctgtggtattttgctgtgccagtagactaagatagtcatcaggtctccctgagcaactcttgactctgacggtcttacagttttcttgtttttgatggccctgagagttttgagagtactggccagatattttgtagaatgtccctcaattgggatttgtctctttttttctcattaatagactggggttatgagttttagagaggaagaccagcaaggtgaaatgtcattctcatcacttcgtatcaagggttcatactatccacatgtcctatcactgatgttgttgacattgatcacctggctgagatgctgtttatcaggtttctccactgtctcccataacattactcttttctccttctttccatactgtattctcacttacagaatgggaagtttagggcttcacatgttatttgtaaaacagcaggactggattactccatttctaagtcatctctagtttgttccttataatcaatgagaagtactgtcctgattgaaaaggaaatctatattcacagaacagggtgagagagcaggatcacttaggttcaaacccttagttttaaccgtcttagcgctctttctgaacagagggactacaaaaaaccattgtgaacgtagcaatttaatgatctacttttttgcaagttggcaccatattatgtattgatcagccttggacagatcactgtgtccagactcaattctgaaaacttgtggagggttggagagtaggggtatgtctattcttcacctaacaacactgatgatgatgacactgttggtcataaagcaatactcaataattttgttgattgctgatcagttacttcaaacacaaacttgtagaccattttctttctttcttctttttttttttgagatggagtctcgctctgtcacccaggctggagtgcagtggcatgatctcggctcactgcaagctccgcttcccgggttcacgccattcttctgcctcagcctcccaattagctgggactacaggcgccccccaccacgcctggctaattttttgtatttttagtagagacggagtttcaccttgttagccaggatggtctccatctcctgacttcatgatctgcccaccttggcctcccaaagtgctgggattacaggcgtgagccactgcgcctggctttgtagaccattttctagaaccaacaggtaaaatttactagaaattttatcttggacgtgaactctaggtagtttacatttcttattctagcatatagtgcatgcattgagattctaccaatataaatatgtaaaataaggcaaaataaatgaatttcaaaaggaaattaaggtctttaagctttatctatgtgaattatccttaaaatgtgaagaattgctagctgttttttatccaacttcttatttcctgcaccagtttgaaacacactctccttaagaaattcttaaaagtttccaattactgtaggaataatggaaatttttctctttaaataacccgaacattaatttgttgttctttaacaggatttcctttttaatgattataaaagctcatctgtccatgatatatagcaatgtacccatacaatatgaaattgtattttacccataaacagtcttcaaacaagacacacaattttcttgcttactggctaattaaaataaaatttaaacccacattaaacttgattacattgtcaaaacacccacatttttaaaggagaggcctacagtgttaattcagagagagtgattctttactcttcagctaataattgcttcagtattaataataacttcacctaaaaatagcttcggtagtctcagatttttaaaatcatgtcaatgtaatcatgcttttatgtcctcttcatttgtggaaaaggaaacaaatgatttgtcctatgtatgagaagatcttttaaaatgaagtttctagggtttccaagttggcgaaacgtttgtcagtatcatcatctggtttgtagaccacattgattcatatactggctacactgcatattaattgcagtttctttattatggaatatttaaaatgcacaaagatacacagtgaactataataaatacccctatgtgcccacctccaggaaaagtaatcattgtgtttttaaaaaataaaacatcatactggagttcctctttgtttcatgttcattctctttcttcctcaggagttatcagtgtgctgcagttgatgtgcattttactcttcgttttatcatatctgcccacaaccacaaatgccataggactgtgttttgtatttcaacattttatttaaactgtatcatattttctgtatcattctatagcttactttcttgactccatatgtgagttcaagagaaattaatgttgatgcatgtagtctagtttatatttttggctatctagtattttgtcatgtaaataaatcagaatttgtttatccatttcccctatgatgagctttaagttgttccacaaagttgagtcttgcaaaggttgctagactgaacatccttgtgtattcttgtgtacgtcaactgtgccagttgtggggggagaatatacctagatgaggacttgttgggttggaagacatagttaacttcaattttaccagatagttccaaattactctttggagtgattgtagcagaattcactcccgagtaaatgaaaatttctatttccaaatatcctcaccatatcctcagacattttaaatatttaccaatctgataagtattcttcttgctctcattttcctgatgactactgagattgagcatttttcatgctttttcttgtttcactttaccttctttttctgtaaattatttattgccttatctttttattgcttcataagagttctttatatatcttgggtattaatgctttggtatgcaactagtaaatatctcttcccagtttatcacttgccttttaatttaactttttaaatatgtattgactaagaagttagatactagtcatttaacttcgtttatgtaattttttattctatagataatttaaatttcggaacagccatatatatgtctagtttcttttcattttgtctttcaatcagctctaataattttctcaactgagatcttgtatgagtttcatttatttttaactatattatagtttttgtttttcttttttaatgagctttttaaatttacattttctaaatgattttttgctggtatatatgagcactatggatggttgtacattaatctttatatgcaacaacattgcttaactctcttgcttttccctacaggaaaatatataaaaataaccatttttttctcccttttcaaaattaattcctatttttgtcttattgcattcattagaaaccccagtacaatgttgaatagcaacattctgtcttcttaaccttaaagacaatacttctagagtttccctattaaatatgaaatttgctatatttttggtatatggccaaaagaggtacatgtaagatgtatcagtcaatatttagatttggaggtaacagaaactcaccccaactatcttaaactgaagttgggtaaatctgattctttaggtcgctgctgagaactccattacggacatcactgcttcttggtactcagcactaattccatcatgttctcattttcatagctaccagaaaaacttctccactgttcttatatcttactgtcgctctcttgagagtcaaaggcctagatgacagcattcaattagctggagctaggaactaacatgattgagttgggtttttcctttcttgtactatccaggcccagttttggtgtcaagattgtactagcttcataaaatgaattgaaacacttttctttttccttcccttccttcctttcttttcttctttttttttctgaaattgattaagaaaaaaagtatcaggtttttgaaagtttggtaaattgtaaaaccattctggctagtgcatttttagggacagggaaaaaagatagacaaaaataataatttattcagttattagttgtctgttcaggctttgctatttctattttggtcatttatattttttggatacatcagtttcttttaattttttaaaagctttgaagataaagctattcacagtattcttttattttttcaaatttgtacagtatttatagttgtcgcttctttttcattcccagtacaattatgtatcgtgcgttctcttttcttttgcttgaccaattttgctacatgtttatctattttattagttttttcaaaccagtttttatactagttcatcgggttctaaaaattatgctgcaatacttatggcctaaaaggaatagtaattataatttttagtcatatgtagtaactactaggaaaaagtttatttttctgttttaattacattaaaaagtcccctggaaaatatgagttaagtgttttctcctgcggagattgcagtgagccgagatcgcgccactgcactccagactggcgacagagggagactctgtctcaaaataaataaataaataaataaaagctttttcctatctagtttttacaaggaaaatcttttttattgattgattgattgatttgttatcataatactttaagttttagggcacatgtgcacaatgtgcaggttagttacatatgtatacatgtgccatgctgctgcgctgcacccactaactcgtcatctagcattaggtatatctcccaatgctatccctcccccttccccccaccccacaacagtccccagagtgtgatgttccccttcctgtgtccatatgttctcattgttcaattcccacctatgagtgagaatatgtggtgtttggttttttgttcttgcgatagtttactaagaatgatgatttccaattccatccatgtccctacaaaggacatgaactcatcattttttatggctgcatagtattccatggtgtatatgtgccacattttctcaatccagactatcattgttggacatttgggttggttccaagtctttgctattgtgaataatgctgcaataaacatacgtgtgcatgtgtctttatagcagcataatttatagccctttgggtatatacccagtaatgggatgactgggtcaaatggtatttctagttctagatccctgaggaatcgccacactgacttccacaatggttgaactagtttacagtcccaccaacagtgtaaaagtgttcctatttctccacatcctctccaggacttgttgtttcctgactttttaatgattgccattctaactggtgtgagatgatatctcattgtggttttgatttgcatttctctgatggccagtgatggtgagcattttttcatgtgttttttggctgcataaatgtcttcttttgagaagtgtctgttcatgtccttcgcccactttttgatggggttgtttgtttttttcttgtaaatttgttcgagttcattgtagattctggatattagccctttgtcagatgactaggttgcgaaaattttctcccattttgtaggttgcctgctcactctgatggtagtttcttttgctgtgcagaagctctttagtttcattagatcccatttgtcaattttggcttttgttgccattgcttttggtgttttagacatgaagtccttgcccatgcctatgtcctgaatggtactgcctaggttttcttctagggtttttatggttttaggtctaacgtttaagtctttaatccaacttgaattgatttttgtataaggtgtaaggaagggatccagtttcagctttctacatatggctagcccgttttcccagcaccatttattaaatagggaatcctttcctcattgcttgtttttctcaggtttgtcaaagatcagatagttgtagatatgcggcgttatttctgagggctctgttctgttccattgatctatgtctctgttttggtgccagtaccatgctgttttggttactgtagccttgtagtatagtttgaagtcaggtagtgtgatgcctccagctttgttcttttggcttaggattgacttggcgatacaaggaaagtcttaacagatgtacacaatttttgagacatataagtaggttttttctccaataaacagatgtttataaaggatttgtatgtgccattatgataaactacaaagataaatacacatgctctgttctctaagagttttccagccaataaaaatttacagctactctttattgtccaccatactctgttatgagccatgggctttagtaagttctcatgacattgggcactgacttcctgggagtgtaagtgactcacctggaccccacagccagtgagcattagtgcttatattccatcctccaaagctctttcttcataccagaccacacatgtggcccaaggagggatatttactctgcacttttagagttctaaaaaacattgtttagtggtctggcatcatctatatttacttggcttgatttgggatagagtataatcctagtcctcgacgaaaggattttgatgagttaaccttacggggtgatgggatttatgggattatttccacccttaaaatgatttgtgggaaaaaaaagtgtactaatccctaatttaggattaagacagatatacctatgagatatgggtctataaaattcatcataatttgagaaatgcaacaaataatcacctctaaaatatcttgttggttcagttattttagtccaaaagccagttggagatctgttctgtatcaagggctccagccctcttgtgagaggtagctgtttttcattcgcttgtagtcttgaagtaaaaacaatgtcagggatggtctcctcagaaccccagagggtctgccttttaggaagtgtttgtcccctcagaaacgagaaaccagatgagctgagtttaggggtcagaccagaggaaatggctggaaattagaggtctcctggctaattcacatgatgccaaataacagtctttctgttgggtgtcagaatccagaatggtgggaaatttgtatctaggggatataaaagaaaatgaatgagataatatatgcaaacagatgagtagagtgcctgaaatgtactaatagccttcagtagattccttctccaatttcaccccttctccatctcaggtttggctttcccctggacctgtcaatacaaaccctgagagtttgattgaacaatggcactgtatggtcaatgctaccagactctttaacatgccttgtttgccacaatttcattgaatgggagcagaatggcaaccaaaccaaggctaacagactttgtcctagaattcccacaccaagtaggaagcataaaataacttagagacttgactatagttcctgcatctattagtcatggtgtgttagcagaacacaatctcagaaagttatttcctaaatgccttccaaagccttggttcttcatgcagatagttttggccaactgtaatggcagtgagaaactcacgagtgtccagaagaacagaatttatactttaagtttaactttgttttgtattgaatgttccttaaaaataaaccttcacctgattcttattttcatttcaattccatgggctggtgatttgagtgtcagggatagagttcttagaatctgtttatgtggtgtgaatacagaaatggtctgattctgagtattaggatcatgatcagagttttgatataaactcaaaacctcactaagccacgtgttattttttgaagcatagaaattggactttgcaaacaaccaaaatccttttgtttgagaaactctaaataagcattgagttttcttgccatgaagttttacactgtatctagaaagtttctttgaaaaattcctctgtaaacctaaggctgacaaagaagttggctagttgaagggaaaatgatacttatgttttgtggcaagggggaacaaaaggagggggaaaagtaattactgtccacttaacattttatatgaaatttctaatgcataattttcaagacgggcaagagttttggtttgttttaaccaaatatagttacaatattaaatacgtgttctaaatccagcatgtgaatatcacttcttcaaaaaaatttttaatttttttaattgaaaaataaatatatgtatttatggtgtacaacgtgatgctttgaaatatgtatatatcgtagaatagctaaatgatgctaatttacatatgcattaccttacatattcatcatttttttgtggtgagagcacttaaaatctgctgccttagaaatttacaaggacacaatgttattaactacagttaccatgttgtacaatagatatcttaaacttattcctgctgtctaaccgaaattttgtatcctttcaccaacatttccccaacccctcatcccccaactcctcaccagtaaccatcattctactctctgcttctgtagttcaatttttttagattctacatgtaagtgagatcatgcagtatttgtctttgtgtacctggccaatttcacttaacataacatcctctagtttcatccatgttgttgcaaatgacaggatttctttcttttttaaggctgagtagtattctattgtgtatatgtgccacttaaaaaaaatccattcatgtgtagatggacactttggctgattccaaatcttgactattgtgaataatgctgcaatgaacatgggaatgcagatatctctttgacatactgatttcatttctttgaatatatgcccataagagggattgctgaatcatatggtggctctatttttaagtttttcaggggcttccatgctgctttccgtagtggctgtaccaatttgcaatcctaccaacagtccacaagtgttccattttctccacaccttcaccaacatttatctcgtctttgtgttgataaccatcctaacagatgtgaggtgatctctcactacggttttgatttgtgtttccttgttgattaatgatgttgagcatttttaaatgtttctgttggctatttgtatttctgtatgtcttcttttgaggagtgtttccaggtcctttgcccatttttaatgggttatttgttttcttgctattgagttgagtttcttatatatactggatattagcccctcaccagatatatagttcacaaatattttctccttgtccatgagctgccttttcattgtgttgtttcccttgctatgcagaagctttttaatttgatgtaattccaccttttgtttgcttccttttattgcctgtgctttgggggtcatatctaaaaatattattaatgagcagcttttccccattgttttcttcaagatcaatgtcaaagaggttttcctttctgttttcttctagtttgaggacttatgtttggatttttaatccattttgagttgatttttgtgtctagtataggggtctagtttcattttttggtatgtggatatacagttttcctaacaccacttattgaaaagactatcaatttattaaagaaaagttttgatttgttttatccaaacacagttacaatgttagatgtgtgttggaaaccagcatgcgaatgtcacctcaacaaattttaacaacagaagggatgggaacagcaaggggatgaggaaataaacagaacataggatttaacaatcaatgggatattaacacatttatgcctgaggttgcaattttttgcatttttgcaatcagaccttgcaatgaccttgagcagtaagatataataactcccatgcttagcgttccaataatggaacactaggcataaatgggtttaagggcacttggggtcacagatgtaagcttagaaggggattaaatgtggccaatgccttgcttttgcccatttaaaaaatttcaactaattctgatgtttttctaacattctgtgattacaggatggtaagtttgcatggtggaagatcagattgggcaccaggataatggccacagggacctcagtagagctcccagtaactcaagggcaccaggagtatgtaagagtggagagagtgcacaaagaaaaacttgacccccttcataatttaagctaatgtcaatccgcctggcacttcagagtcttatttctcaaaacgtggccccagaacagcttgtacccaaatgccctgtgggtctgttaaaaatttaagttcccagaagacactctaaaccagtggaatcagaacgctgggaatggggtctgagaagatacattccaaacaaatagcctaggcaattcttaggtactctcgtgattgaacctctgcaccaaagagggaaaagtataagttagaaaggaatttataagcaccatacacaaaaatagccatgactcaggcctccacatctcatttgtgctgtcacttcccctgggaagtctgatcaccccaaatgccgcattgtataatcttttttttttttttgaaatggagtgtcactctgtcgcccaggctggagtacaatggcatgatctcggctcattgcaagctccgcctcctgagttcaagtgattctcctgcctcagcctcctgagtagctgagattacaggtacctaccaccacacctggctaattttttatattgttagtagagatgaggtttcatcatgttggccaggctggtctcgaactcctgacctcaaatgatccacctacctcggcctcccaaagtgcaggaattacaatagtacttaacacactctattgaattgctggcttttctttctctttagcccatgtaatccagtgtcattcatctcctctgcttaacaaagagcttagttcatgaaagccgcccaataaatgttctttaaattaataaatgacttcatgtcttgctgttccaaaatatactccttaacctgcctgaatactttcacttcactttgccaattatttcatttggtatatcggagaattttagtttaaataatgaaatcagtcagttatccagtagggtcaattaattccactttcgctttcccaaagattgtagagcaactacacacagagaatgaggcagcagtgatgcaagtaattttgaaacacagttttagagttaaattgtttctggatgcaggcatacaataaatgggtaagtgctgcgtgggggacactgagcaccgaagagttggagggaaagccccagggagttatgaaagggagtacagggaacagggaagaaaaggaagatgtaacctacttatctaaaacttttacctagaaatgaacctgcattcagggtcatggtgggagaaaacactcctcctcctttgatggctgtgacctcctcatagttcctgaacatagcactcaagctggtcctaatcccactacatgaataagtgaaataggctttgagaaactagtctgaaaagttgatcaccctatgaaaaaatgcatgcaaaatcccagaaaacatttcaaaacttttgaaatccaaccaactcagaaattgagcaaagccaagattagatttgtcttgcagatcaacttagtgaaagcagatgttactcgtgaagacaaaggtcaggaccctagagacataacaagaaatattttatgagaaggaaacttgatgtggattgaaaggcagaagaaatgaaaagaaaaaggcacatgaacatttttaagcaattgtaacagaatgaccaaatttcctgaaccccagacatatgataaatcatataacatgaataggcccccttcaaattggtggcatgcaacatggcaaaacccatctctactaaaaatacaaaagtcagctgggcttggtggcgggcacctgtagtcccaactactcaggaggcagagacaggagaatcgcttgaacccaggaggcagaggttgcagtgagccaagatcatgtcactgcacttcagcctgggtgacacagcaagactttatctcaaaaaaaaaaaaaggttgcatgagcaatatatagtgatggtgactccagttttgccaagatataagcaagattgaagaggccagaaaatgtggatatgttagtgcaagcaaatcatcaattcttttttttttttttttttttgtatttaagttctgaggtacatgtgcagaatgtggaggtttgttacataggtatacatgtgccatggctgtttgctgcacccatcaacccgtcatctacattaggtatttctcctaacgctatccctcccctagcctcccaccccccgacaggccccggtgtgtgatgttcccctccctgtgtccatgtgttcttattgttcaactcccacttatgagtgagagcatgtagtgtttggttttctgttctggtgttggtttgctgagaatgatggtttccagcttcacccatgtccccacaaaggacatgaactcatccttttttatggatgcatagtattctatggtgtatgtgtgccacattttctttattcagtctatcattgatgggcatttgggttggttccaagtctttgctcttgtgaacagtgctgcaataaacatacatgtgcatgtgtctttatagtagaatgacttataatcctttgggtatatacccagtaatgggattgctgggtcaaatggtatttctagttctagatccttgagaaatcgccacactgtcttccacaatggttgaactaatttacactcctaccaacagtgtaaaacaaaataacatatatttattaaacatatgtgtctctgtctgtgtgtgttacacttaggcacataaaagatatttaacaaacattgttgaatggataaatgactgaatgagcagctactatgtgtcaggtgctagaaatagccaaaatgttctaaaagactgtggggaattagcaattccttttagaacaggggtccccaaccctggggccatgaaccagtacctgtccgtggtctgttagaaaccaggccacatagaggaagtgagtggcaggtgagtgagcgaagcttcatctgtattttacagctgctccccatccctcacattaccacctgagctctgcctcctgtcagatcagcagtggcattagattcttataggaaagtgaaccctattgtgaactgcacatgcgagggacctagactgcgtgttccttatgagaatctaatgcctgatgatctgaggtggaactgaggcagcgatgctagcactcagcagcagctgcaaatacaggttaacatcagcagagaggcttgactgcatagaaaccataataaatcaattgcttgcagactcatatcaaaaccctaaaagtgagtgacatgtgacaagtaagctgcatctggtggcaagctttatagtggcaagtgagttgatgtacttcaattgtacagctgcatctggtatccttaaaagtatgtttcagacaatttcaaatctccatatgttctggattaaagtcaaggcagaatatcctgagattgctacaaaagctctgaaaagcctgcttccatttccaacatcctatctttgtgaagcagggttttctgcagtgacagcaaccaaaatgagattacagagtagactggacataagcaacacactttgggtgtcactgtctcccatcacccacagatgggaccatctagttgcaggaaaacaagctcggggctcccactgactccacattatggtgagttgcataattatttcactatgtattaccatgtaataataatagaaataacatgcacaatacatgtaatatgcttgattcatcccagaaccatccccccgaccctgccagtctgtggaaaaattgtcttccatgaaactggtccctggtaccaaaaaggttgggaaccgctgctctagaatgttccccttggctggggagtccctgatcaaccactgaggctctgcttaagtgttccctcccctgcaaagtctactatcaccctaattaattactattccactgaaaagctcatcccaccatcttacactggttagatgttttacctgcttgtcttcctcactaggataaggggaaaaaagattctgggtttgttccgtatttgttttccccaaatctactgtttgtaatagggaaagggagaaaggaaaggcataagaaagagaagagaggacagtaggcgggaaagaaggagagcaaggtgagataaatcatgttcttttgcccctaaggaaattatgttacatggtaggtttgttgctagatactgagaccctgattctaccttatattcaatggacattgtttaattacatttattgctttaccactctggaaagaaatgtattaatttaaaatgttttggatcaattatttctttttattacagttcttacggcttattgaaaccactcagcacacttttagatatgtaaaatgtatgatctgagtcatgataaaaagaaatttcataggtaacagcatcagtaaatatgtggctgcactttcagtgctgacctacctatattcttttctgagtttacaacctcagttatcaacaactgacattactcaatagttggcacatggcatccaatgcatggacttgaaagtaggctttaaaattacagtaatcggccgcgtgtggtggctcatgcctgtaatcccagcactttgggaggcggaagcgggcagatcacgaggtcaggagatcaaaaccatcctggctaacatggtgaaaccccgtctctactaaaaacacacacacaaaaaaaaaaaccaggcgtggtggcgggtgcctgtagtcccagctacttgggaggctgaggcaagagaatggcgtgaacccgagaggcggagcttgcagtgagctgagatagtgccactgcactccagcctgggcaacaaagcgagactccgtctcaaaaacaaaaacaaaacaaacaacaaaaaaattacagtaattactgtgggcatgataattgtatgtgtcaacttgtgttgtgcgccacagtgtttccagatatttggtcaaagagttttctggctgtggctgagggggtgtcttcgatgagattaacatttgcatcagcagactgagtgctgtgatttgaatgtttgtgtcctcctctccccagaattcatttattgaaactaacccttaatatggtggtattaagatgtggggtgtttggggccgggcacggtggctcacacctgtaataccagcactttgggaggctgaagcaggtggattacgaggtcaggagatcgagaccatcctggccaacatggtgaaaccccatctctactaaaaatacaaaaattagccgggcatggtggcacatacctgtagtcccagctacttgggaggctgaggcacaagaatcgcttgaacccgggaggcacaggttgcagggagccaagatcacgccactgcactccagcccaggtgacaaagcgagacttcatctcaaaagaacaaaaaaaaagatgtggggcgtttgggaggtgattgggtcatgaaggtggagcgctcattaatgagattattaaggagattactgcccttagaaaacagcccaagaagtctatgtgctccttctgccatctaaggacacagctagaaggcaccaaagagcaagtccccaccagacactcaatttgctgtgtgcatgtggagatctcttggtgctttgatcttgggcttcccagtttctagaaggtgagaaataaatttctattgtccataaattactcagtttaacatattctgttatagcagcccaatggactaagacactgagtaaagcagattgacctgaataggctataaatggaaaggaaaacttttcctgcctgactgcttgatctgggacatcagtctttatctgtcttctaactcaaactaaaacgtcagccctttggggagtctcaagcctactggcttgagataaggggaaagacccacccccatgattcaattaccttccactgagtccctcccacagcacatgggaattcaagataaatttgggtggggacacagccaaaccacatcatcagggttttcttacatagtgttgataatcctttccagggtactgggtgtaatgagccttaaaggtctttaggaccctgatgtaaagactaaattaaagatgtgtgtttgggggcaagtagaccacttcagcacctccagtgttgaactcatggagttctgggtggccaggggcattgttcaatatcaaaagaaccttaaatggcagtcccttactggcaaggtacctcctgacttgagggacaaagcataaatggagtcaatccagaaaaagagttctcattgtacaggccttcttgtacaaccaaaagattggcaggtggtgtttaacttttcccttcaaggctcaggggttagctgctttatagataagggcagtccttatcataaaccgaactgcatttgcacaaaacagtagaggtagcccatctcttcctgccttaaatcctggtgctcacttctttttcttactaataaatgtccttcatggcatttttttgcagaacagggcacctttatttgcattaaaaacctatttagtacacctactatgtaccccctaaaattttaaaaaattaaaatctatttaggcagatattcttctcagtgattgtcttaatggtgcctgggaactcatctgctgcctgttggttggcaaaacctgattctcctgttatcgtcacatttttaaaaccaaacatcgttctaaaactatcacaccatcttttgctggcattaaattcttcagctttagttcctttaacttcattttactttaagttgttatatgacttcactttttttcaaataataatagagtatttaggcatgcttttttttttttttttttagatggagtcttgctctgtcaccagtctggagtgcagtggcgcaatctcggctcactgcaacctccaccttccgggttcaagcgattcttctgcctcagcctcccgagtagctgggactagaggtgcacgccaccatgcctggctaattttttgtatttttgtagagacagagcttcaccattttggccaggatggtctcgatctcctgacctcatgatctgcccacctcggactcccaaagtgctgggattataggcttgggccactgtgcctggccaggtatgcctttcttatagcaattctgcaccgacataaaagctccattttcaatatgagataaaaaggtattttgcaaaaagtataagtttttatacctgctggtgtagctgcagtgacagcctcatgaattttctttcttttttaacaatgggccttgcactagattcatttatcttgaaatggcaggcaatcgcagctgcagacctccatctatggtaaatatcaagcagttcaactttttcttgtcatgatttttctctgcttcttgggagcactttcagcaacactaatagcactttgtatagatcccatggtgttattcaaggtttacagtattgcactaaatataatgaaaaataagtgagaacagtgagaggtcactttttactgtcatatggaatctactggagacacaaactgcttatacagagataattagtgacatgaaatttgaagcagatacttgcaacacctgagcttagcacaaaagcaacaggagctggctatgacatttttgcagtagtacagtatgtacagttcattgtatgcagtaatgatttaatactttatgtttgctcacatttctcttgattgtgaatggtacatgtgcagtctgtatttgggtttgaaagttttgataaattttaactttttataatagatttgtatgtattttatcataatgtatgataaaatagatgagtatctccctagcttttttcttaatttctttttatatttccaggccatatggttcaactgcaagtttttaaaaattgttgcagatctccataaaaggattcaatatgtttattttttaaaattgtgtataattaaacttgcaattcaaagatagacttgaaccctaattattccaatggataaatcagtataaatatgtagttatttttttttaacatgagaagagatgggaagttggtttcggacaaatctgaagctgtttctatcatattctataatattggtttgtttccttgatatttatgtatctttcacataaaaataaaatataatagacaatacattaaactgggagcccagaaactttggttctaggattgaattatatgtgagacattcaataaatcactgaaccttctaggcttgagttccctcactttgaaagtgaaaggatgaaatatttagtttcaggatactaaagacatcttgatccctaaactgctttctggaaaaaagccaaaagcaacaaggaaatttagcagtacacactcccatctgtcattattagaaaatcttcattaacttcaaccataatatatatgaagaaaggctggcaagtatagtgaatttggaccagagagaggcaagaaactgaaagaagatggttactggacctcaaaggatgacagtgcagaggtctttgaagtaggtgatacacatcaaggggtaagacatgatagaacaagatggatggcctcaaggagctcctgaaaccccacaagaaacccctccaatgcaggggatgtgatgacaaatgaagacacatgcagacaagctaactctacaagaaactatctgtttggaagaccagatgagaaactgaatgataagcagcttgaggctgtcaatctttatccgccattgaatgtaaactccagggaggcagaaattttttttctgatttatctattgctatattctccaaacctagagcagtacctggcacaaagtaggtgcacaataaatatttgtatgatggatggatgagtaaagaaagattacagctaaaccacacaatcgacatacttgtgtgtatgtgtgtgtgtgtatgcacacgcatgcaaacaagcaaacattaccgtgtcacctctagagaaaaatcccttcattattgaaaaggaattaacataggatttatgcaaaaataaccctatttacataaagaagcaagccaacaaaacaaataaaaatcataaaaagggcaaccaccaaaaatatttttattgccctagagaaggtaaaacttgtgaccaaagttatctgtgagttcataaaacttaatgaataaggtgacctttctgtgttaggactccagagtgaagataagaagtctcaaatttaaaaaaagataaggcaataaaaaatgttaaaaaaaggtatttggtagatcttgggatagaagtaaaagagcaaaataaaagcatcaaagaaataaaagctttgggccaggcacagtggctcacacctgtaatcccagcactttggaaggtagaggcaggcagatcacctgaggtcaggagttcaagaccagcctggccaacacagtgaaacctcgtctctactaaaaatacaaaaattagctgggtgtggtggcgggcacctataatcccagctatttgggaggctgaggcaggggaatcacttgaacctgggaggcggaggttgcagtgagccgagatcacgccactgcactccagcctgggcaacaagagtgaaactccatctcaaaaaaaaaaaaaaaaaaagaaaggccttaatgggaacagcaatgttgcccatgttgaaaatataagtgaagacattcatgacatcttgagaaagtggagcaaaatgaaatagaaaagaaaaaagactagagtaggaaaaaattgtagatcgagaacacaggggaaattgaacaggtacaacacattggatttttattagaaattatatgtaaaacattcaatattcttgtttttaaagacaaaatcagaaaaaaatggagaacaaaaatatccaaagttatatcaaaaaactcctgaaataagagatttgaatctgtagaattaaaggacacacaatattccagcaaacataaatatctattaatttccatgcataatctagtaaagttaaggaacttcaaagaaaaataaagaacccaagagtatctaaaaaaggtgagagcataaatatcttatctgaaaagcaaaagaattaagctagcttcaaatttctctccattcagtgctaggaataatgaaatcatcaagttctcagggtaacaaagtatgatccctaaattttatacccagacacaccaggcttgtttcttctgtccatctgtgcaataactttttcaaatgtgtaaaacgtaggggaaaaaaacctacatgagctttaaaaaagctgttagccaactaggtcaaccaagatataaatgatgagctatgagcattaagtcattttaaatttaaaactaaggttaaaatgacttcaggaaattagggtgtgcagaacagaatagaaatgtaataagttatccctttataaaaataatataactaacaaaaatcaggagcaagagggaaatgaaaatgggagataatttaagtaccaatcttctcatttttaaatatattgtttaaggctgatctgagactaaggctgatctaagattaagcacataactaaccaaaatgagtgtagcagaaaagaaaagcaagaagatggaagtaactggacatattctaaaagcatcattcatagtgagaaattaataggtactgtttaaaggaagagagaccttacgatattacataaagttatatcttacaaagtaacaaattactagaggaactcaagtagatcataagcctttcatattatgaaaaattgaccttagaaatcacagaccaatggtaaaatattaaaaacaaagtgtaatgaacttatccttccaggaatgctggtttacatcacataaaccactcctggtaagaaaaattagcaaagcaggattaaaaaaaatttaatcacaaaatagtaaacaattatgaaacaaagaggagaaaaagggaaatcagagaggtaaatcctaggaatgtgattcaaggaatagttgagcagaggtttggcagcactatagggctagacagtaagaaaaaaaaatctatcaagaaaggatctctgataaaccccctacattgagttgggatcccaaagggctccatctagtagtaaggggtagctggaaaaaaaacttgggacagaagtccagttttcaaccatcttagttcctctaattggattacggtaatataagattgctagtccccctaaccaactgccatgagcaaatggaaatcctaccaggaaatacaattttaggcttcaaatgatttcaacactttttgtatacaacatcttgcacacaataaaaagtaaccagacaaatgagaagagaagatgatgtaataaaaaattgagagaaataccagcaacagaaatgaatgcacaggagattcagaatatgaataatcagacattttacaatttttaatagagaaaatttttttaaacccaaaatggattctttgaaaagactaataaaattgataaacctttggtaaggttgattgaggaaataaagaatcagaaataaaaaaggagtctattatcacagagcctatagatatttttaaattatattatttaaatatattaactttatgtctctaaatttgaaatttttaataaaatggatatatttctataaaaaacaatttaccaaaactgacacatgaagaaatagaaaatatgaatcattctgtaacctttaaaagaattaaaaaccataacaaaggccatcatgatttccccagagttatttaactcccttttcccatgtaaaatttacttccaaatctttgagaaggcattccttacttcagcaataggaatcttcagggttttttttaattatgaggacatattttcccttcctcatcttatttaactcagtgttataaaactgttctatgatttacttttgaggattatatatattagcttctcatatatttcataccctaggagtttagatcatatagcatgatagtgaagggagaaagggagaaaagtgggagacatggaaggggagtgaaaagagagctgtcctgatttggattgttacagttccatatctgcacccccagcagtttatttatgatggagagaaaataagtaaaaatatatgtgacttgattttcagtttgaaaatgtgttaatgagaaaaaaacccaaatcaatctaattctttatgcttactttatggaaataaaaaatttctgtactatgtggtagaaatgagtgtgtgccattctgggaaactgttcttcagactacctggtgacctatcagttaatcaaagcatttgacattttttctaaagaaaagagggtgaaataataacttggcctttcttaaaaaaatatacccatggattctgcatccttgccagttgtctattacatagtttgttgagactgcccaacgttgtctggaatttccaagcctcagcgctataaaaataattcactagaactgcctcaaaataatttatatcgtgtaagtacttaacactgcactttggactacagtatgtgatggatatgctaggaattatgctgggttcagtgagagttctgcacaaaggcctcttttgccgtaactaccaggttcttgatgtttaaggaattgtgttgataggccctagaaacttaggacctacaattactggagcatatttattgcagcacagaagagagttgatggtggctgatacaatattggtataaacaaggtcactagtgttccagtatgaacattcaagagcccttagggaaaacaaagaagtcactttcacaaagaactttcaattgcctgctctctgatactaaaacagaatttaaaaatgaacctagttcattttttttcttgtctcttggctaaaagaccacagaaaactgatccttcacttaatttcaagcaaaaattgtattgtttttggtgaaatccattttttacctcaaggattcagcctaaggttatcacatcaaaatatattttctttaaaaatctgaagtttggccttgaattttcaaggaaattctgcttgaattattatatgggatgaaatatttaagtattactctttttttctctctttcaatgaattaagacaaatacaagcaccttttaaaaatcaggcagggaaataaatgctaattaaattctcttaccagtagtttttcattttgtgaaacaaacttttctagatcggatagactttactgatgagtgtttttgataatgctgaatggaattgagtatgacctcccagatacagatgcatttggacttctcatccacttagtctttttcattcaaactggaaaatcatgtggtttcatttttattatttttttaattgagaggattgtcaggagaaaatatgtatgtggctttatttttattttaaccaataagattgtcagtaggaaatgcattctgaatatagcacacatggggcaaatgttcctttttggtcatgacattttttcattataatgggggtttgccagggcatataccatgttttaatgccttttacatataaaatcacaacaagataagactttagacctctctgtaaaagctgcggtataatgggaactagcatgctctgactggttgcctcaattaataaaacaatcaggaaatctcgagggtttccttccacagatttgagtatcccttgatgacctgcataaaccctagttcttataaatctgttcactctcctgcaccggaggaaggggagatggaaagctggcctgttggtgacatacacagcattatgcttagaaaagtatgggtttcttccatgctaccatcctactcttggcatgaaattatactttgtgatcctacagtcatacatttgaaggaactacacacataggagacagcgtgaccctaggctctgactgggtatctttgtttatattttgataaagaagtttatggaaaaagttatttttaattgaacaataatttgaggcatggtaaaaaaatatgtattgtctaggaattattatttaatatttagaaaaaaacatgaggctttaacttgaagaaataaatatattttcagggaaaatctatgttgtttcttatttatttgcactttggtactctagaacaccattaggatgtcttgtttcagattttaaaggtaggtattatccctgtgatccttcgtgtgcaaactagcttagcaacctgcccccaggagagtaaccacagagccagtggatctatcccatgctcccttgcatgaaccagcctggcactttgcccacagggaagcagcgccagaaccagcaaactagccacacaaactctagtagcctaggtcacagaggcacttataggcatcactgacattgactatagaaacttcagagaggctacactactgtcctcaccgagaaccaaagccaatgcactctacccaactgactccctaggacacaccttcaggtgaaagtcttcccctctggaagctactgtataaaactggaagaggcaattcttccaccagatgcacaggtatcaacagagggacacaagaaacacgacactgccatataagcacagtgattccccagttacttaacacaaagaaatagaaatttatgaatcttaaggaaactcagatacaagagaacatagatagacatttcaaatacattgggaagataatttatgttctgtatgagaaattgaacaaagagatagatatcattaaaaagaaccaaacaaacttccacttgagcagcctgagacatccatgggtgggggtattttctccctcaactgttcctaccacaggctttctgaggtttttcctagtgaggccaagagggtctttgaggaaaactgcatccagacatgccttgagggaaggtgtcaaatgcaggagcatggaaaagagttacaatttggatatgaaaccatttttctagcccaccttagagaagactgttgacacactggtcaaaatggttccaatcgcctaccttgcaagacacttcaggttcaaagaatttcccttgtaaaagcaacaagggaggtgtcggagttttccatttagatcaacaaattcaagttcttaccatggaaaattcagagaagactgtagtggttctccttgcttgtggctccttcaatcctgtcaccaacatgcacctcaggttgtttgaactagccaaggactgcatgaattgaacaggaagatagagagttgtggaaggcataatctctcccgttggtgatgcatacaagaagaagggactcatgcctgcccatcaccaggacatcatggcagaacttgccaccaagaattccaaattggtggaagttgatacatggaaaaattttcagaaggagtggatagagactgttaagatgctaagacactatcaagataaactggaggctagtgactgtgatcaacagcagaactcacctacactagaaaggcctggacgaaagaggaattccatgagctgaacaaagacaagcttctagtcaaaagagatccctagagccaaaaacaaaaggtgcaccaaaagtcaagctgctgtgtggggcagatttactggagtcctttggtgttcccaatttctggaagagtgaagacatcacccaaatcatggcagactatgggctcatatgcattactcaagctggaaatgctgctcagaaattcatctatgaatctgatgtgctatgcaaacactggagcaacattcatgtggtgaatgaatggatcactaatgatatctcatccacaaaaatccgaagagccctcagaaggggccagagcatccactacttggtactagatcttgtccaagaatacatcgaaaagcataatttgtacagctccaagagtgaagacactccgagagtgaagacagtgaagacagctccgaaagtgaatgacaggggccatcctggccactttacagagaaacactgcagaagctaaggcatagaaattctgcagcataatgttttgcactttcctttcagggtttgaaacaatctgggtgttaataactgggaaaagaaattgtggtcctgttgcataaactaaagattaaaagtttagtaaaaatcagtggtaagttaaaatcagggtttttttttttttctttttatcagaagttgctaagatgaatgttttccatatggtctttttctaaaaaaaaaaaaaaatgtacaattctctttatctttaaaccaagagcttagcagcacacaaaaaccagaagaattttcagtgaaactagctacaaataagaaatcaaaaagtacagcctagctctaccacacaaaagaagcaaagtgtgaaaagcaaaagttcacttaaaattctaatttaggttatgaagagaattgacattttatgcatgcctgctgtgggtaatctgcagctagggtagacaaaggaaggaattcttatagtggtgatcttgtaaaatgcaccattgataaatcatctccagttatgcaaaataaaggttgtgcatatgcctggcagaaacattgtaccaatagttagttctctgtggcacacatcacaattgctgactaaagtttggcaagacctatctgcctggagcttcctctttagaagtaggaagtgaagtccaagccctcatatgtttagaaaagtatgcaagttttctgatgcctaccagaggtagagacctgctgccttatactttatacacagttacttttccttgttatgggtcatgctctagccttggtcatccaccctctctttaccttcagaaacaatttcagagttgacatcatgctaccttgaattgagagaaccacagagaatgagaagtctattcaaggattttatgtctgaatgctcttagcctttattgatagcttaatcagaagatctaagtggggtgcagtggcacatgctctgtagtcccatctacctgagaggctggagcagaaggatcacttgagcccaggagtttgacaccagcctgggcaaaatagtgagaactcattttttaaaactctgaagtttctgaagggccctgctgtttctgttccagccaactgtgaatctgccatttgtgaatttaagcagaaaaagggtctgttttctcatattttttttcttcttgtccttttgtatgaagtttaacctaaagtagtattctcaaataattagtcatagcttcatgttaaaaacacatgcttgttacatggttttccactgattaaacttttgtggaaatttcaccaattgctaaagcagaaagaccagaaatagctttttatagaatcgttttggggtttgcgaaaattgtcccatgatagaaacaggactaaagttaaatttctaatgaaaatataataatttgcctttttgcaatttctatttcattcctacacaaacccagatgaagggtttgtaactccagaagaaaaaaaatacttagatatgtgcaattgtatagtcagatctgaatctacagtttaaaaaataaaaatgttaaataaagttaagcaaatatatgtgcttcaactcccaacttactcttactaaagccttcaggccaattcccaaaaacagggagggtgcaaagcctgacacctagcagctttcaggatccatctgccaagtgaatgaaaggttggaatctcaaatcctacatctgtaggatgacttatctaagagtcatttttctcctcctcagcttcttggagtttaagagttgaaggggccctgaaaagtaatgattgagcatgaagaagctataagaattgaactttgataccttctgggaaataatacacagtttatctgaagtgttgtgtaaactgcagaaaggttccaatgctagaaaattctctcatactgtcatgcctttccacttagaagtgcccatgccctgcgtagctgtgactctactgacctcaggacctcactgggcaaggcatgtggtaacccttgcaggagacctgataatggtgaaatgattctattgctatattatttatggagcaacaactttgtacagagaacgagctgcttggctttttcttccaatgccaaggatgctgctgatgctgccatgtaacagcatacttttgggtgtcctcaaggatagaacttcccctctgaataatggaaattagaacaatgaacttcacaggggaataaatattaatgaccgatgtgaagaaaatattccattgtttattccctaccacatcatttccataattggctgttgtactgtgaatttagaggaaatgggtaatgcttgtgttttgttttgcttgtttgtttgatgctgggggttttatgtgttgtacactttaccccttacattgcataatttgaatgcagcaaacaaacccgcaataaaagtcatttattggcatcttcattcagatgaatggagagcctttgtggtagtgtcaaaaaaaataaaaataataaaaataaaaagaaccaaacagaaattttggagctgaaaaatttaactaataaaatgaagaaatacaattcagagcttcaatagcagactaaattaagcagaagacaaaaatttgtgaacttaaagacaggtcttttcaaataacctagtcagagatccaaaagaaaaaagaataaaaagaacaaccaaggccagctggacttctgggacaccaactaagcaaacaaatatttgcattatgggatttccataggacaaaagatgaagagagacacagaaaggttacttaaaaaaacaatagttaaaaacttcccaagtctttggagagatatgtacatccagctccatgaagcacaaagaatcccaaacagattcaacccaaagaggttctctccaaagcacatttaaatcaaatcatcaaaagttaaagacagaattccaaaagcagcgagagaagagaatcaagttacatataagggaatccccactagactatcagcagatttctcaacaaaaactgcaggccaagaaagaaccagataataaattcaaagtgcttaaagaggtgaggtgggggtgcgggggaactgtctacctagaatactacacccagaaaatttatacttcagaaatgaaggagaaatagtgtttctaggcaagagaaagctgagggaatccatcactgctagaccagccatataagaaatgctagagagaatgcttcaactggatgtattaggaaaataattactagtatgaaaaaaagaaagtataatctcatcggtatgagtaaatttattatcaaatttagaatactccattactgtaatggtggtatataaactttcagttgtctagtttgaagattaaaagtcaaaatggtcaatgattactatagctacaacaagttgttaaaatacgtacaggatatgaaaagatacaaggtaagcaacaaagttataaatttggtgggggaggccaggtgcagtagctcatgcctataatcccaacactttgggaggccgaggtgggtggatcacctgaggtcaagagtttgagaccagcctgaccaaaatggtgaaaccgcatctctactaaaaatacaaaaattagctgggtgtggtggtgtgtgcctgcagtcccaggtactcaggaggctgaggcaggagaattgcttgaacccgggagacggacgttgcagtgagccaagattgcaccattgtactctagcccaggcaacaaagcaagactctgtctcaaaaaaaaaatgtttttaataaaaaataaacaaatttgggaggtggaaggtaagtctagaatacttgtaagtagccaaagttaagttattatcaacttaaattgtctattataactacacagtttttaaaatgtaagccccatggtaaccacaaagaaaaaaattacagcagatacacaatgaaaaagaaaaaaaaatcaaagtttatcactacaaaaaaaatcaccaaaccacacaggtaaactataagagagggcaaaaggaacaaaggaaatacaaaaaaaaaaaaacacaaaatgatttaacaaaatgtcaagagtaagttcttacctatcaataataaccttgaatgtaaatgaattaaattttccaattaaaagatatagagtggctgaatgggtagaagacaaaacccaactatatgctacctacaagagatttactttacctataaggacacacatagactgaaagcgaagggatgaaaaatgatattcaatgcaaatggaagccaaaagactacaagagtaactatacttagataacagataattcaaaaattgaaagtggagacaaagaaggtaaatctataataaaggggtcaattagcaaccaattataacaattctaaatagatatgcacccaacactggagcatatataaagcaaatattataacatctaaagagtgatacagactgcaatacaataatagtaggagatttcaacaccctactttcagcaatagatagatcatccaaactgaaaatcagcaaaaacaaaaaaacactggatttatgctgcactctagaccaaatggacctaacagatatttgcagaacatttcacccaccagcaacctacagaatacacatttttctcaaaagtatattgaattttctccacaatagattatatgttaggccacaaaacaagtctcaacaaatttttaaaaatcaaaagcatattaagtatttttctgatcacaatggaataaaattagaaactgataacaggaagaattttggaaattgtgcaaatacatggaaattaaacaacatgctcctggaaaaaccaatgggccaatcaaaatatttaaaatgaaaatttaaaatttcttgaaacaaatgaaaatggaaacacaacacacctcaatctatgggatatagcaacagcagttctaagagggaagtttatagcaataaatgcctacatcaaaaaaatagaaagatatcaaataaacaacctaacattgtacctcaaggaagtaaaaaaagaaaaaaaaaagaacaagctaaatttaaaattaagaatgaagggaataataaagatcagagcataaataagtgaaatagagactaaaaaatagaaaacatcaatgaaacaaagaattattttttaaaaagataaactaaattgacaaacctttagctagacaaagaaaaaagagataagacacagataaataaaatcagagattaaaaagaagccattacacctgataccacagaaatacagagaatcataagagacaattatgttgtgcacatgtaccctagaacttaaagtataataaaaaaataaatatatatattaaaaataaataaataaataaaaagaaatagaaaaaagaaaaaaaagaaaatctagaagacatggatattttcatggacacatataacctaccaaaattgataatagaaaatatgaacagatcaataatgagtaacaagattcaatcagtaataaaaatttccgatcacagaaaagcatgggacctgatggcttcattgctgaattctactgaatatttaaagaataattaataccaattcttttgaaactattccaaaaaactgaagaggagataaattcatctaaattcattctatgaggccagcattaccctgatacaaaaacaagacaaggacacaacaaagaaagaaaacaacaggcaaacatcctcaacaaaatacaagcaaaccaaattcaacagcaaattaaaaagatagttcaccatgaccaactgggagatggaaggatgattcatcatatgcaaatcaataagcatcatacatcacattaataaaatcaatgacaaaactgatgcaaaaaaagcatttgataaaatttaaaattccttcaggataaaaatctctcaacaaattaggtatagaaggaacacaccttaacatgataaaggccaaatatgataattccacagctaacatcatactgaacacggaaaagttcaaagcttctcctctaagatctggaacaagacaagcatgcccactttcaacactttcatctacccagagcaattaggaaagagaaagaaataaagggtatccaaatggaaaaggaggaactcaaactgtccctgttttcatataacataattttatatatttaaaaaaaccctaaagatgccaccataaaactattagaactaataaacaaatttagtaaagttgcaggatacaaaatcaacatacaaaaatcagtagcacttctatgtgccaataaaaaactatctgaaaaataaaccaaaaaagcaatcccatttacaacagttacaagaaaaaagatacttaggaatacatttaaccaagaaggtgaaaaatttctacaattgaaattataaaatgttgatgatgaaattgaagaggacacaagtaaatggataaagatatcttgagttcattgattagaagaattaatattaaaatgtctatactactcccaaaagatctacagattcaatgaaatccttatcaaaattccaatgacagtttttcaaagaaatagaaaaaaatcctaaattcatatgaaaccacaaaacatcttgaatatccaaagcaattttgagtaaaaagaaaaaagctgacggcatcatactagctgacttcaagataaactacaaagctatagtaaccaaaacagcatggcactggcattaaaatagacacatagaccaatggaacagaacagagatcacagaaataaatccacgcacttaaagccaattgattttcaacaaacatgccatgaatacacattggggaaagaagagtctcttcaaaaaattgttctgggaaaactggatatccacaagcagaagaatgaaagtagacccggtctttcatcatatacaaaaaatcaaatcaatattgactagaagcttaaatcaacactaatgataaaattactagaataaaacatagggaaatccctttatgacactggcctaggcaaagattttttttataacatctgaaaagcataggcaacaaaagcaaaaattgataaatgggattacatcaaactaaaaacttctgcacagcaaagtcaacaattaacaaagtggagagacgacatacagaatgggagaaaatatttgcaaagcatacatctgataaagggttaatatacggaatacaaaagaaacccaaacaactcagcaaaaaaacaaacacagtcatgttccacataacattttggtcaatgataaatgggatctaagtaaactaaagagctttggcacagtaaaagtaactatcaacagagtaaacagacaacctacagaatgggagaaaatttttgcaaattatgtatctgacaaaggtctaatatccagcatctataaggaacttaaacaaatttacaggaaaacaacaaacaacctcattaaaaagtgggcaaaggacatggacaaacacttctcaaaataagatacatccagccaatgagcctatgaaaaaaggctcaacatcactgatcattaaagaaatggaaattaaaaccacaatgagataccatctcagaccagtcagaatagctattattaaaaagtaaaaaaataacagatgctggtgaggttgtagagaaaaaggaatgcttttacactattggtgggggtgtaaattagttcagccattgtggaagaaggcgtggtgatttctcaaaaacctaaagacagaaataccattaaacccagcaatcccattactcattactaggtatatacccaaagtaatataaattattctcttataaagacatggcacacatatgttcattgcagccctattcacaataccaaagacatggaatcaacctaaatgttcatcaatgatagaatggataaaaaaatgtgttacatatacactatggaatactatgcagccataaaaaagaatgagatcatgtcctttgcagggacatggatggagctaggggcaattatccttagcaaacaaacgcaggtacagaaaaccaaatacagcatgtcctcagttataagtgggaactaaataatgagaacacatggacacacagaggggaacaaaacacactggggcctattgaagggtggaaggtaggaggagggagaggatcaggaaaaacaactaatggctattaggcctaataactgggtgatgaaataatctgtacaacaaacccccaggacacaagtttacctatggaacaaacctgcacttgtacccctgaacttaaaagttaaagaaaaattttggtcaatgatagcatatataaaagtgattcaataagaccacaatattgtattttttgtgccttttctatggttagatatgcttagatacacagatatttaccatcatgttacaattgtctacagttttcagtacagtaacatactatacaggtgtctagcctaggagcaataagctatacaatctaggtctatgtaagtacattctgtgatgttcacacaataacaacattgtgttacaatgcatttttcagaatgtattccaacccttaagtgatgcatgactgtaatctgattttaaaatgggcaaaagacctaaatagacatttctgaaatggccaacaggtatatgaaaatatgcttaacattagcaatcatcagaggaatacaaataaaagtcacaatgagatatcaccttgccccaattagaatgggtattctcaaaatactaaaaaatgacaaatgctagtatagatgtggagaaaagagaactctcatacacttttggtggtaaattaggacagccattatggaaaacagtatgaagtttcctcaaaaaattaaaactagaaccatcatatgatccagcaagctcactattgtgtatatgttcaaaggaaatgaaatcagtatggcaaagagatatctgcactctcgtgtttattgcagcactattcacaaaagccaagatatggaatcagcctaagtgttcatcaagagatgaataaacaaactgtcacaaatatacacaatggaatgatnnnnnnnnnntacagtgtagggaagtggtgaccaccggcagaagagtgtaggggtaagaggaggatggggagagattagtcaatgggtacaaagttacagttggataggagaaataagttctgtgttctgttgtacagtagggtgactatagttaatgacattgcattgtatatttcaaaatagctaagatagagcgttttcaatgttctcacaacaaagaaatgataaatgtataaggtaattgatatgctaaatgccctgatttggtcattacacaactatacatgtactgaaacttcaccctgtacctgataaatatgtacaattataatgtgtcagtaaaaaacaaaacaaacataagaaccatatatgaaaaacccacagccaatatcatactgaatgggcaaaagctggaaataattcccttgaaaactggcccaagacaaggatgccctctctcaccactcctattcaacatagtattggaagttctagggcactcaggcaagagaaagaaatagagtattcagattcaaagagaagaagtcaaattatctttgtttgtagataacatgatcctatatctagaaaaccccatagtttcagcccaaaagcttcttaagctgataagcaacttcagcaaattctcaggatataaaatcaatattcaaaaatcactagcattcctgtacacaaacaacaggcaagcagagagccaaatcacgaatgaactcccattcacaactgctacaaaaagaataaaatacctaagaatacagctaaccagggaggtgtaaagtctctacaaggagaactacaaaccactgctcaaagaaatcatagaggacataaacaaatggaaaaacattccatgctcatggatagaaagaatcaatattgtgaaaatggtcatactgcccaaagtaatttatagattcaatgctattcccattaaactaccattgacatgctacacagaattagaaaaaactattttaaaattaatatgaaaccaaacagagcccaaatagccaagacaatactaagcaaaaagaacaaagctggaggcatcatgctacctaacttcaaactacacaacaaggctacagtaatgaaaacagcatggtactgggacaagaacagacacatagaccaatggaacagaaaaaaagaactcggaaataagtccacacacttacaaccatctgatcttcaacaaacttggcaaaaacaagcaatggggaaatgattccctatttaataaatggtgctgagagtcctggctagccatatgcagaaaactgaaactggaccccttcctnnnnnnnnnnnnnnnnnnnnnnnnnnnnnnnnnnnnnnnnnnnnnnnnnnnnnnnnnnnnnnnnnnnnnnnnnnnnnnnnnnnnnnnnnnnnnnnnnnnnnnnnnnnnnnnnnnnnnnnnnnnnnnnnnnnnnnnnnnnnnnnnnnnnnnnnnnnnnnnnnnnnnnnnnnnnnnnnnnnnnnnnnnnnnnnnnnnnnnnnnnnnnnnnnnnnnnnnnnnnnnnnnnnnnnnnnnnnnnnnnnnnnnnnnnnnnnnnnnnnnnnnnnnnnnnnnnnnnnnnnnnnnnnnnnnnnnnnnnnnnnnnnnnnnnnnnnnnnnnnnnnnnnnnnnnnnnnnnnnnnnnnnnnnnnnnnnnnnnnnnnnnnnnnnnnnnnnnnnnnnnnnnnnnnnnnnnnnnnnnnnnnnnnnnnnnnnnnnnnnnnnnnnnnnnnnnnnnnnnnnnnnnnnnnnnnnnnnnnnnnnnnnnnnnnnnnnnnnnnnnnnnnnnnnnnnnnnnnnnnnnnnnnnnnnnnnnnnnnnnnnnnnnnnnnnnnnnnnnnnnnnnnnnnnnnnnnnnnnnnnnnnnnnnnnnnnnnnnnnnnnnnnnnnnnntaattcaaatttaatcctgaggatttggcatacttcagaacttgcacagcaaagatttctgataaaacacgaagcatttcacaaagcaaaatgacaaatgggatctattaaagtaaagagcttctgcacagcaaagaaactatcatcagagtgacagacaaccaacagaatggagaaaagtttggaatgtattcatctgacaaaggtctaatatccagaatctacaaggaactttaatttacaaaaaacaaacatcctctttaaaaagtgggcaaaggacaggaatggacacttcataaaagaagacatacatgggaccaacaatcatatgaaaaaaaggtcaacatcactgatcattagaaaaacccaaatcaaaaccacgatgaggctgggacagtggctcacgcctgtaatcccaacactttgggaggccaaggtgggcggatcacgaggtcaggagattgagaccatcctggctaacacggtgaaacctcttctctactaaaaacacaaaaaattagccaggtgtggtggcatgtgcctgcagtcccagctacttgggaggctgaggcaggagacttgcttgaacctgggaggcggaggttgcagtgagccgagattgtgccactgcactccagcctgggcaacagagcaagactctgtctcaaaaaaaaaaaaccacacacacacacacacacacacacaatgagataccatcttacaccagttcagaatggctattactaaaaagtcaaaaaaacaacagatgctggcgagattgcagagaaaaaaagaatgctatacactgttggtgagagtgtaagttagttcaactattgtggaagacagtgtggtgattcctcaacgatgtagaggcagaaacactatttgacccagcaatcccattacttagcatatacccaaagtagtataaatcattctattataaagatatgcacacatatattcactacagcactattcacaatagcaaagatgtagaatcaacctaaatgcccatcaatgacagactgaataaagaaaatgtggtacatatacaccatggaatactatgcggccataaaaaggaatgagatcatgtcctttgcagggacatggatggagttggaagatactatcctcatcatactgacgcaggaagagaaaaccaaacaccacatgttctcacttataagtgggagctgaaagatgaaaaaagagctgggtttatgtccatgtctggttttggtaacagagtaatgttggccttgtacaatgcattagggataattgccacctcttcaacttttagaaacactttgggaagattggtattagttctttatacatttggtagaattccacagtgaacccatctgatcctgggcttttcttcaatgaaagaattattatttattttaagttctgggatacacgtgtagaatgtgcaggtttgttgcataggtaaatgggtgccatggtggtttgctgcacctatcaacccgtcagctaggtattaagcccagcatcaattagctattcttcctcatgctctccctcccatggcccccaacaggctccagtgtacgtcattccccctcatgtgtccatgtgttctcatcattcagctcccacttggttttttttcatcatcactgctgtttcaatgaaaacataaattcaaaccaatttcacatttactgaataattatggaagctagaaacccacagggtaatgacacaaatacaaaatacctacctaaataatatcggacatatactgggtattttggttacctatagctacataagtatttactgtaaaatataagtttaaaacaattaccaatttaacatctctaatgatagtgtatatcaggaattggggtaagagatagctgaatcattctcatggcatcatcagagtttactcactggtattcagatgacaagtgggcttttctggagagtccaagatggcattattcacttgtctgctgccttgataaggatggctgaatgctagtctcaggtggaactttgctgcaaggcttcctctaatgtaacctcaaaatttcagaacacacttctgccacattctataatcaagcaaatgatcaaagccagcccagattcccaaagagcgaaattggtggccatgtttttacttccataatcagggagaagggcaggaaatatgatccagaacaaagagaaaaatgagttagtagcagctgacacagaatgacagagatggtggaattaacaagaaatgacattaaaacatctattgtaagtcctctaaacaacctcaaaaaaataaaagaatgcataatcacaatgagagaaatggaagacataaagaagacctaaaaggaacttctaaagttaaaaatatataaaatgaaaataactggatgagattaacatcaatgaatactacagaaggggaaaaaaatagaacttaaagacttagcaatagaaactagccaaaattaagcccagagaggggaaaaaaatacttaaaaaaacaaaaaaattgagtgcatcaattacccatatgacaatatcaagtgatctatcttgtgatctatcttacacataattggagttccagaaggaaatgagagagaaaaaaacataaagaaaaattttaatgcaacaataatcatatattttccaaatttgataaaaactttaaccccataaattcaagaacctctcaatgaatctcaggaagaataaatataaagaaaatgataccaggacataccataatcaaattgctgaaaacaagtgataaggagagtatcttaaaagtagccacatttaaaaaatacacattacctacaaaggaatgaaggttaaaagggaaacaggcttattgtcagaaacttcacaggctggaatacaacagaataacattaaagtattggaaaaaacctgtctacatagaatggtatatccagtaaaagtgtcttcctatattaaaagtaaaaatacttcctcagataagcaaaagttgagtgaagtcatttccaccagacctgtactaaaaacaaaacacattaaaggaagttcttcaagacagaaagaaaatagaaatttggatctacataaatgaaagaaagaaacaggcatagtgggtagaaaatatgtggttttaaatcaatgtataataattgaaacacacatactgaaaggaaaattaatgcaggagtgttgacacctgaaatgcaaatcaagaatgggaagaactcgctttttggccatttttcaaataaaattatttttttcctcataaacaacagcacaaacaaccgacacaaatacacacacacacacccctcccccaaaatgtttgactatggtattccatatgtctgagtagaatatataggtgataaacatatacatactatttttgaatgcctagcccattgttctgactggattgaaaatgccttaagacaattaggtcttgtctccttgaataaaattcactgacaacactttgaaattgtaacgatagatggtgaatttatgaactgccaaaaggcatgtgagaaccaagaaaaagagttaccctgtgccaaagcccacattgccatttgttaaggacagctgctatgacacatgtttgttcattggctcttttttttttttttttttttttttttttgaaacagtcttgctctgtcccccaggctggagtgcagtggcatgatctcggctcattgcaagctctgccattctcctgcctcagcctcccgagtagctgggactacaggtgcccactaccatgcccggctaattttttgtatttttagttgagaccgggtttcaccgtgttagccaggatggtctcgatctcctgacctcatgatccacccacctcagcctcccaaagtgctgggattacaggtgtgagccaccgcgcccggcctgttcattggcttttatatagaagtattaactgaatgcctgctatgtttatggacaacattgtagctaagaccccatatattataattcctgacattcactcgggactttgcaatagatagctcgcttttatatctaccttgctttctcttcataacaataaatgaggagggtggatattattatccctttttcagttgaggttaagaaagccttgactctcaactcatcaccctacttccttcactaaagctgtaatatcctttagactctgtcataaacagaagccttcaggtctcagctgaattcagttttttcatggggacttctcatatacagcagatcttccaataaggtcgttttgttataatgttgatgaaaaaaacattgattcctggccgggattactgtccatgggaagttcacacattcttcctatatctgcatgggctttcttctgttattattaatacggtttccttccacatcccaaagatgagcatactaggttcgatggcctgtctaaatggtctcaatctgatgagtgcaggggtgtatgtgcgagtgtgtcctgtaatggaatgatgtcaaaggctggttcctactttgctccaagctgccaggatgggctctggccaccagtgaccctgagctggaataagcaggttggaaaatgaatgaatgaataaatacaagttattataaaataaaaaatttttaagtacatgataatcatacaataaacaatgcagtatgaaagcacttagtgagattactatatttgttgtttgtttctgaactgcgtgatggtaggaggtgcttctgacaatgttcattttgcaaacatttattctttgattgaatctaccaccactgtgattgccctcactctctgattcaccgaaaattgagtaaatcattatcttgtttttatttttctttcttaaatgtatatatagttcacatttatttcaatgtttaatagtataagtgttttggtctttatttagaagtttggtgatgtttttgtgaccagaaatatgccacaggaatttaactcttgtttatatccattatcctatgataaaattggttttgttatacatcattttcttaaaattgtagtttccaagaacctaaccaggacattaagtgagaatgtactgtactcacgtaggtcttgtattatttcttcatagcatatagttattaaagtgagattttttaaaaaatgtttggctcccacattggtctcagcttcaggcaggcagaagctttgactctaccatagcaaccccagcactctgaataatgcctggagcatggtaggcactcaatatatgtggtctactaaatgtgtgttggttcctgaaatgcttctagatcaaaactgcatagcaagggaaggaatctgtctatggttatgtagtttcagaataccatatctatatgtactttataatgaaaagcttgcaggaaaattggctactattactttattaaatgaatttgagtcactcatcctttcttcagattattcatccataaaataacaatgtttgaaaaccatataggtattaaaacagtgctcctcaaagcccagatggttctgtgagggttgaggaagagcaaagagatatatttaattttttttcttttatttacataccaagtaaaagcactacacatattaaatggcagtccaaggctaggtttggttctgtgtccctacccaagtctcatcttgaattgtaatccccatgtgtcaagggagatatctggtgtgaggtgattggatcacagggacggtttcccccatgctattcttggtataatgagttctcacaagagctgttggtttttaaagtatttggcagttcaccctttgctctctctctcctgccgccatgaagaaggtgcttgtttgcccttcaccttccgctaccttctgccatgattgtgtttcctgaggcctcccaagccatgcagaactgtgagtcaattacccagtctcaggtatttatttatagcagtacaaaaacagactaacacagtttataataaaatattcccagtattattgaaggagcactataatgctccctaagaacttagaaacaaatgaaatcaagtaaatttttaaagtaacacacaatggatcataataaagacatataaaatctcttaagggaaacagaataacaccctacaatacgaagaaaacatccatcaggcaggagattgatcagcaataaaggcaaaggaaaagtggagtcagagatgagaactctggaaattcccaaccggtctatgtccaggagaaaggaaagttaaatcagtgttcagaacttcaggcaaggtcattttttgtatgaaacaacaatactatgctctcttagcctgagaacattttttaaaatggattcatctcctgttttgattgatttcatgatttcaggcaaacttctgaatatttcatggttccctaaaatagtctgctgagaagaaaaattggtcataccatcacgaatattcagacccatgtgacagttgtatttctcatcatcaataaattggcaaactgatttatatgtttttgtttaaaacacctagttagtgttcactatgttcctaacattgttataagtgcttctaataataatttattacatcttcatagcaactccatgtggtaggtacaatcctataaagataataatagtaaagtaatgcactttttctgttaaaaattatttttaattgacaattatatctatttatggggtacagtaggatattttgacatatgcatacattgtgggatgatcaaatcaggctaattaacaagtacaccaccctacgtatttctttgtgatgagaacacttaaaatccacccttttttcaattttgaaagatttgggagattttatgggtcctttccaagccatcacaataaagtaagtcgcacaattttattttgttttctggtgcatataaaattatgtttacactacatggtgtagtctaccagtgctaagatttctctgtagcatgcaatgctgtttgatagcattttatatgcagtggaacttctttcaaaattggagtcaatcttctcatatcctgcttctgctttatcaactaagtttatgtaatattctaaatttctttgttttcatttaaacaatattcacagcatcttcacctggactagattccatttcaagaaaccactttctttgctcattcataagaagcaactccttatcgaataaagtttcatgatgagattgcagcaattcagtcacatttcaggctctacttctaactctagttctcttgctattttcaccacatccgtagttacctcctccactgaagtttttaacccctcaaaattatccatagaagttggaattaacttcctccaaactcctgttaatgttgaaattttgaccttctcccatggattacaaatgttcttaatggtatctagaatgatgactcttttccagaaagctttaaatttaccttgtcttggtgactgtgaatactgctgcagtgaatgtggagtgcagatgtttcttcagcttactgatttttattcctttgggtggcatagctggatcatatggtatttctacttttagtttttgaaataaccttcatagtttttccaaaatagttgtactaattcacatttgcacaacacagtgtgtgaaggttcccttttctctacatccttgccaacactagctagcattcacctttttgatgatagccattcttacaggtgcagggtgatgtctcattgtggtttaatttgcatttccctgttgagtagtgatgttgagcatttttaactatatctgttggccatttatatgtcttcttctgagaagtgtctatccatgtcatttgcccatttttaatacgagtatatgtttcattgaatcatttgagttccttatatatttttgatatgagtcccttatcaaaatgaggccctttgacaatatatttgcaaatattttctcccaatctacaggttttcttttcactctgttgatggcttcctttgccatgcaaaagattttttagtttgatgcaatcccaattgtctaattttgcttttgttgcctgtgctttgggggacatacccatgaaataattgcccagaccaatgtcaaggagcttttctcctagtcttctcttatgagttttacagtttcagatcttacatttaagagtctcacccatcttgagttgattctactatcaagggagagataaagttccaattttatttttctgcatgtggatagccactttttctaacaccatttattgaagagactgttctttcctcattgtgtgttcttggcacctttgttgaaaatcaattgaccatagagatgtgcgtttatctggggactctctaccctattcgattcattgatgtgtctgtttttatggcagtaccctgcagttttggttactataactttgtgatgtattttgcaatcaggtagtttaatgccttaacctttgttatttttgctcaagattgctttggttattcaggatctattgtggctccattcaaattttaagattgttctatttctgtgaaaaatgacattggaattttgataggattgcactgaatctggagatcactttgggtagtatagacattttaacaatattaattcttccaattcatgaacacagaatatctttccatttctttgtgtcttcaatttcttttatcaatgttttatagttttcagtgtataggttcttctcctccttggttaaatttactccagagtatcttattttttatagctattgcaaatggaattgttttcttaatttttttcagatagttcattgttaccatatagaaacactactaaattttgtatgttgattttgtaacctactttactgaattttattcatcagttctaacaaatttagggggctgagggaggggagagggagagggagagagatttgtactgtaaagaattggttcacatgattatggaggctaagaggctcaagataagcagttggaaaactgaagagccaggagagccaaaggtatagtatcagtcaaagttgaaagtcctgagaaccaagagagctgatggtataaattctggtttgaatccaatggcctgagaaccaggagagcctgtggtgtagaatttagtccaagtctgaaagcaaagaaaattgatgtcccagcttaaagacaagcagagataaataatttttcttactgagccttcaattgattggatgaggcccattcacattgggaagggcaagctgctttattgagtttaccaattcaaatgtcaatctcatccagaaacatcctcacagacacaacacgaaataatgtttaagcaaatatcttcatatcccatgacccaatcaagctaacacataaaattaagcattatacttgtgtacacaaatagacatttttaacttagctgtgcatttctccaaatcatttagcaaattacaaataccaatcaagaatgctgatggaaacatacctacttgtgtgactacaagttaaaacactgataacaccaggtgttggtgaggatgtagagttgactggaactcctatacatcactggtatgagtgaacatgttacaatcactttggaaactggacgtttttgtgatagttaagtatacacttacctatgatccataaatcatattcctagatatttacccaagagcaaagagtatgtgtgtccataaaatgatttgtacatggatgttcttcatagcagctttcttcataatagccccaaactagaaacaaccatcaactagagaatgaacaaaaaaatgcatattcataattagcaataaaaatcactactgatacatgtaataacatagatttgtctcagaaacattatgttgaacaaaagaagcaaggcagaaaagtggctgatttttgattatttatgtgaagttaataaacaagcaatctgtgatgatagaagtcagaatagtagttatcctatagaagagcaggattactgatatagtttgactgtgtccccactcaaatctcatcttgaattcccacatgttgtgggagggacctggtgggaaataattgagtcatgagagcaggtctttcctgtgctgtcttcatgatagtgaataagtctcacaagatctgatggttttaaaaacaggagtttcccttcacaagttgtctctctttgcctgctgccatccatgtaagatgtgacttgctcctccttgccttccgccatgattgtgaggcctcttcagccatgtgaactgcaagtccattaaacctctttttcttcccagtcttgggtatgtctttattagcagtgtgaaaatggattaatacagtaaattggtactgggaatgggttgctgctgaaaacatacctgaaatgtggaagcgactttggaactgggtaacaggcagaggctagagcagtttcgagggctcagaagaaaacaggaaaatgtgggaaagtttggaacttcctagagacttgttgaatgctttgaccaaaatgctgacaatgatacggacaatgaaatctaggctgagatggtctcagatggagatgaggaacttgttgggaactggagcaaaggtgactcttgttatgttttagcaaagagactggcagcattttgcccttgccctagagatttgtggaactttgaacttgagagagatgattagggtatatatctctatatgtctggtggaagaaatttctaagcatcaaagcattcaagatgtgacttgggtgctgttaaaggcattcagttttaaaaaggaaaccaagcataaaagttcaaaaaattcgcagcctgacaatgcaacagaaaagaaaatcccattttctgaggagaaattcaagccagctgcagaaaattgcatgagtaatgaggagctgaatgttaatccccaagacaatgggaaaaatgtctccagggcatgtcagagaactttgtggcagcccctttcatcacagacatagaggcctgggaggaaaaaaatggcatcgtgggctgggcctagtttccctctgctgtgtgcactctagggacttagtaccctgcatcccagctgctccagctgtgactaaaaggggccaagatacagctcagaccatggcttcagaggatgcaagccccaagccttggcagcttccacatggtatagagcctgtgggtacacagaagtcaagaattgaggtttgggaacctcctcttagatttcaaaggatatatggaaatgcctggatgtccaggcagaagtttgctgcaggggtgaggcactcatgaagaatctctgctaaggcagtgcagaagggaaatttggggtggccacccccacacagagtcctcactgaggtactgcctagtggaactgtgagaagagggccaccatcccccagaccctggaatggtagatccacagaccacttgcaccatgcacctggaaaatctacagacactcaacactagcccatgaaagcagctgagagggaggctgtaccctgtaaagccacaggggcagagctgtccaacaccatgggaactcaacccttgcatcagtgtgacctggatgtgagacatggagtcaaaggagatcgttttggagctttaacatttgactgtcctgctgtatttcagacttgctgactttttggacttgtagcccctttgttttggccaatttctcccatttggaatggctgtatttacccaatacttgtatctgcattgtatctaggaagtaactagcttgcttttgattttacaggctcataggttgaagggacttgccttgtctcagatgagactttggactgtggacttttgagttaatgctgaaatgagttaagactttgggagactgttggggaggcatgattggttttgaaacataaggacatgagatttgggaggagccagggtggaatgatatggtttggctgtgtccccacccaaatcttgagttcccacatgttgtgggagggactcagtgggagggaattgaatcatgggagcaggtctttcctgtgctgttctcatgatagtgaataagcctcatgaaatccgatgattttaaagatgggagtttccctgcacaagctctctctcattacctgctgccatccatgtaagacatgacttgctcctccttgacttctgccatgattatgaggcttccttagccacatggtactgtaagtccattaaacctctttttcttcccagtctcgggtatgtctttatcagtagcgtgaaaatgaactaatacaattcctgattggaaaactacacaggaaactttcgggatgatggaaatattttatattttgatccaggcactggtctcatgggtttatgtgtacatatatgcatacatatatgtaaagtataagtatacttatatacaccgaagtatataaatatgcattgtagacttgtgcatctcactgggcgtaaagtatgccttaataaagaactgtgaaaaatagtttcaatacaaaaaattatgctaaataatgaaatgaaaccaaatttaatattttcaacaatttggagacctaaaccaatacttgtgaatagacaactctctcccagatggcctaagctgagcaatttccataagtcaaacttatcaagctattgcttgattttctggggttcagatcacacacaaaaaaagcccaaatcgaaactctgtttgaccctacataataactcacaaatccacttggattctggccagtatgccattctatttcagctgcagtgtcacaccttgcattgtagacatcatatcacctgatatttttgtatcatttgtaaataatttagcagcaacactgactaaaatttactataccacccaaaatacaaaacacaagagaatgacaagttaaaattattttattttaaaaaatagtctatatgcaaatagtcccaagtgtttaactgcatgatccttgtgggtctacacccctgattttaaatcctatgcttgctgtattctttcacagtttgccacagagtattttcttaatgcacaacagtaaaacaaattcaccaatgaaaatttattcttggctgggtgcagtggctcacacctgtaatcccagcactttgggaggccaaggcaggtggattacttgaggtcaggagtttgagaccagcctggtcaacatggtgaaaccccgtctctactgaaaaaacaaaaattagttgggtgtggtggtgggtgcctgtaataccagctactcaggaggctgaggcaggagaatcgcttgaaccccagaggcagaggttgcagtgagccaagattgcaccactgcgctccagcctgggtgacaagagtgaaactccatctcaaaaagaaaaaagaaaagaaaaaaggatttattctcaccaaaataagaacacaaggcaagtgataaatgtcacattaaattgtattaatattgcctaatttgtaatccacaacttcacaatataaaaaatctggattatttttaccaattccctctttttctactatgaatactttctatactcacatagaatagttcagtgaaatatacttggtacacctcagtgaaatactggctgattgattgacacaggtggttaatacaacaagaggcccttaagatgaagatgacattgatattaaacaaacacgcagaatcacaaaatactctcagcctgtttgccaggaggcaaataggacacacaagtgggaagtttggtgtttctggaccacacagtctctgccacggcaaagaagatcagccagcctcctcaactcagtacaattcagacatggtcatgaggtaggggctatagtgagaaatgtgttagaacccacacctacatatgcacatatgcaacacaagctatgtgtttaagattccagaaactgtgtaagaaacaagatgttggaatgttgattggatttacatgttgatgaaatttcagtcaactaagcctagtatcatgcaagattactgtgaaaagtttaattgcaccaactgctcttgtttggaacaaagaactgtcagctctctttacattaaccatatttctctcccccattgctactgcaagaaccaaaaagagagtacttaaaactgggttctacctgcaaaatctgcaagtcagtcagtcatggtttacatgcatgtcaatttttacattatattttcctaaggcagacatttgacagatataaatcttgcctcagcaaggcccaaaggaaacatttgtcatatctccaatggtcattcttgattaaagaaatcacagaaaaacaaattgaaattgcaaactcagcttgtatcttttctctcacataatttctatatcttgaagccaacttctttaaccataaaacgtgcattctccacataggatacaagactatagctgtgaactattttcccagtgagttacatatgatgccttaatcattaatagtaaatagatgtactatttgtatgaggtgaggtttttttgtcatattttagaaagaatcatcattgtcttcttattgtgaattatcaaaggcaaataaaaaacagcctcttccgtacctagcatattttcattagaaacaaattctattgtgatgcaaattctttggacaaaagtgaagcactttgaagattttctaatatttttgtcaaaagaatacacatgtagatgtgtactttgccttttccataaatattcaaaatgtattctgaaattaaaataaaatatttctataaaataaacacattcacttggtgttttttctttcatttgcatttaaagcagtaatcacaatatcacaagattctttgattaaaaggccttctcttgaaaaggtagataatagaaagaacatccagccccttgcccctagatggagggataaaaacagatagatgacaaacattctataaattaactctagccacaaaactactgcaaatcaaaacaaccacaaaacctccacaaaggttatgcacatgccggagcacatgtgtctgggggtcatgaggcatccacatattacaataaattttctccacaacccttattgtaaggttgaactattagggaaaaatggagcagatgctctctaaataaatatgatgtctttatttaatttcctagatgccatgccctcactaattatttttgttctttatttgaagggaaatagataccttagaagaaaactccttttaaatgttttcataagctcaatcaaactaatcacatgttaaaagccaggaaagaaattaaaagggagcttaagctaatatgatgaattttagagaggcaaccaagacaatttataccaaaagtcaacaaaatttacacaaactcaattatgtatttttttagattatgtgcacattactatgaaaatatccaggcaaaatgtatgaactgttaaattgcaattgaatttggcaatctatacaactagttgtcattctaataattcatttaacattattgaaatcagtattttgttccagcatgtgttataatcatgatattaactgaatttattcaacaaggagacattatttttatctcaggctgattgctagcacccacaacttcaattttgtttgatttactgtgcatattgtattattactaagacagatgctctgagacacataatccttattggtctatatatattgatgagctttctttggtaaaaaaaaatctggctgggaaaaatatcttgtttgtggaattaagcaaaacattagcatttcaaatatttttttcttttaaaacaccttatgccacaactaactcaatagtgggaaaaagatctttgttcagaaccgtatgtgtgtaaaagagagagagaattcaagaaacaggtattatatatttcagaaactcatacttcaggaaagaatagaaacattatttgaacctttagcgcaaaggctatcaaattgcacttagatgctatttctgttccaagtcaatttcttagaaaccattataatcttattctagtttcctatttaattttatatatgttatttacttttgaacacgggctaaactcaaaaacttttagtcagtgaaggttacagtttagacccatattacctacaatcttaccgaaggtgtgcccacaaaatgtttgccttacgacagctctatgagtaagactatctttgagcttaaactcaatcgccttgggtgatactcaacaggtgtgtatcttttgttttcctttggcatggcccaattttacacagagattttggtagaatgacttgttcttctcatatctttttagcttcagaatccggataactcaattaaggaaatataagtgggagaccttcaaaggagaacaagtaatttatgggacctgaatttctgaaataatattaaggcaacattgggcttcatgacaaaacaccagaggttgggaagagttgcagatttactcttttgacattcacatcacctccctccctccattttaatagatgattttaccaactaatttggtctttctgatgctttgattaggcaagttacagatatattttaatagttgcaaaaatgaatacttcaaagaaagcatagaccaaggaaatacattgttgaaaagtaacccctcagcttagagaagaaaaaatacacaatgttattctactatctataaatgaggtactaactggatgatgtgtgattaccagtgtgattaaatggcaaaaacagacacaaggagaagctaagtagtatgctgaggcattgtctttttgccaggttaatacactatgcacactgttttccatacaagattctcaagtagtaactatagtaaagagcgtaactcaaaaaatggactgcctaggtggagaggcatactggaatgcatgaaggtgtttcattatgtatgatgagaacagtctccaccttctgaagagtctccaaaaaagcaaactggaggaaaagtcacacctttaaggtgcaaatccaacaaagatgtcttaagattctgaggaagaatttgctccttgccagtcagttatttccagactgcagcatgtagatgataagatcaagatatgattgaagagacttttacttgtgcaagaaggtagtaaccatgctactatttttaatccttaagatttaaaacatgcatttaattcttttaaagatgtacttaatgtatattctgatagcattccaaggcatttccattgaaaagtacatgctataaattcagtagtcttaacatacataatacaatatattatgttgttcacacgaatgttcattgtagcacttttcacaatagcaaaaacatggaatcaacctaaatgcccatcagtgacagattggataaagaaaatgtggtacatatataccatggaatattatgcagttgtaaaaaagaacaagattatgtccttttcagggacttggatggagctggaggccattatcctccgcaaactaacagaggaacagaaaaccaaataccacatgttctcacttataagtgagagctaaatgatgagaactcatggacacaaagagaacaaacagacactggggcctgcttgaaggcagagggtgggaggagggaaaggagcagaaaaaaaataactattgggtactaggcttagtacctgagtgatgaaataatcagtacaaaaaaaaccctgacaccagtttacctatataacaaatctgcacatgtacccccaaacctaaattaaaagataaaataatcatgatttttcaatttaataaaaagaccccccaaaaaatattgcccttcagttaacaaataaagtgtgatgtgaggcaagacatattagtttactgctaattcatagatgaagtctgatgatttactttctgcatctgaatctaacaattcttattgggagaaaaaaatgtgtacatatggttctttggtatgtttgttgagtattatttttgttgattatgtatcagccaacatattgtgaaaactgtcatgctttttaataatgtgtttttataattaaggtgaattattagaaaagcccaatgattaaaactctaattatgtaactgttattttcacaggaagcttattgagactcacctgagaactattccaagtcatgcattttctaatctgcccaatatttccagaatgtaagtttttttaatataaagaaaagtttgcacttgtgatatgttattctctaaacgtgttctatcaagaaaaatacttggtattatacttgcataaatcaatggcagttatattttcaatgtatatgacaattttatgtacatgatttttatttcattttgctatatctctactccctaattcctacatgattttttaaaacctaaatcaaatttaaattcatttgattttgagcagttcataattctcgatgtattttaatatatcttggaatatggcaaaaccttagctgtaaatctctcctataaacatcccgtagtttataaagtaaacatatatacagatagacaaacatccatctgtcctagtcaccaagtcttgaatcacctttcactactaatacaaatatttacattttgttataaacgtagccagtggtttcagatctctcacgttaaaagagaattaaaaataattctaaaccttaaaaattgaattgctatccacttacagtaaggagaaaagggattttccatattgggttgacaaagagtgaatgaaatgaagcaggtctttatttcatttaattgattttgacaggcaatccagatagttcaggcatgcgaaataatataaccagaagcaacctgtacagtttttggccaaatgtactcactccgtggccattttgttagtgtttctgtcatttcagtagttctcaaccacagacgactctacccctagaagcatttagcatttttggttgctaaatgctcactagagagggggctgctactggcacctagtgggtaaaagtgaaggttgctgctgaacattctacagttcataggacagtccccacaacagaattatctagtccaaaatgtcagcagtgctgaggctgacagaccatcctactgaacatctctgcagttttttatgttgctaacaagtccttcctctttcaaattcttgcctctttgttttccttgatattcctctctcattcctcttcttgtctcagctggctactcttccttagtctccttttctgacttcctattttatttttgccagctacttaattaccagctctttctttgtatattttgttctaattcctctatgccccactctccttgagtaaacactcccattccttgggctgcactatttcctaatacagctaatttccaaatattaccacttggatgtcccacaggctcttcaaaaccagcatatccaaaataaacacatcatcttcctcccaagctcttccttctcttttaacagcaccactgtagcatcctataagctaaaaaccttgaattctcctttagctcttccttttccctcatctaccttatacaaccgcctatttggtgtctctgtttgcatgtcccaacagcttggccattacttcattcattcaccagatatttattgagccctactttgtgcctggcactttgctaggtgttccgtacacaaccgtagacaaaactcacagcagttcagttttattccaagagagtgatgagtatcatgatggggtcagttattgggtgatatggaaactcacataagaggtctattacctacacaggagcagggagaggagttggggaagacttcctgaaaaaaaaaaatagcacctgacctgtgatctgcattatatagcaaaaagcagaagggaaaagcctgggctttctgaagaattgaaatataataagtttcttgggggtagagcttaggcagggaggtgggcagtagaaaaaaataaaacctaggtctaagttagtacagggtcttgtaaatcatgtgaaggagtttaaaatcttccctaagggctgagccattcaatggttttaagcaggcaagagaaatggtcagattttcatttgagaaacattcccttggctacgtagtggagtgaggggtggaagtggagcaaggctgtaggcaggaagctagtgaagaggctgatgcagtgcccaaagtacaggggatggcaaattgaaggatgatcattgagtggggataatgaaaaaggatagagatttgagacataaataagggagggctgatcaagtttctgattaggacatctgtgtggttgatcggcacattcatttaggcagagaagtgttttgtatatttgctgtggagggtcgggggtatgttaggaattcaatttggggcatatggcatttgaggtgcagttatattgagtacacatcaggacacagacagaattttttcattcatttgataaatatttgttcagcccctactatgtgccaatcactgctctgagagctggggatacatcagggaacaaacagacaaagatccatgtccccatggagtttccatttgaatgggaggagatagacaatgaaccaaaaacacaataaataagtaaattagatactaatttagaaggaaataagtacatggggaaaaaagtaaattagagtaaagaggattggaagttctgggtatatgggggcactcaggggagagattcaggtagagattgaaagtcacaaacaactgggtgtaactgggaccaggaggaggcatccgcagagagggagaagctaaagagagtgaagaaagaacaattttaagagcatgtggtccctgaagaggcaggaggggatgagatccaaatagagggattggccttctagaggaagatggtcactttttacatcataacgaggaagtcatgttgtaggactttctccttagttcagctaaaagccaggttcttgtcacatggccataaaagattaggctcacagacactttgaagggtgataaaaatagaatttattgggtgaaagaggaaaagagggaaacagggactctcagcaaagcgagagtcctcctagtccacttcccgcctcacagattgaatcccaggtaccaccccacaacaggagaggccaggctcctccccactataaatgaacttcccgaagctccaccccagtacacacttctcccagggcacaggcagttgaaggttctgctagggagcccttttttacttagctgtctcagttgtaggaaaagatgggacagatgcaggtaaactaataggcttattggtggggaattcaaggcattctcgtgttaaagtttcaaacatttctatgacttatcaaattattaaaggacatctaagaagatggaagatggaggtggcagagttagaaatttgatgagaagatttgaaataaaagtggtgagcaataagaagagggttggttgactgagatataggagacacccaggcagatctgaaggctccactgaggcttcccccagggagactgctggattctccagtctgggttaagtgataggggtccctgaaccctatcaagcatttaacaccttgtgttaatcccatttaccttgtacattaatctgtatctgtgagtactgtgagttccttgaaggtagggaacaggcctgttttgtcattgtccagaaggatgtctgtcatacaatgaatgttcaatacatatttgtggaataaaagcacatacacatacatgaataatgattaaagatttgatatatcttggggagaagaaagagatcagtaggatgatgctaggtttgtctgagatggttcaaattcccacttggtattctggcataattgttaatggcaccttgctttaactcacaaaactatcccagtttgaatgataagtcatatggtgactgtaatgattatacgatgtttaaatgcaaagaagaagtaggatctgatttttcctagttgtaaaaatggggtaagtaagcagggaatcacaatttttatccccctgaataaacaattcctgccagttgtcttcacaaccaagctatcacagccctacaaaaaggtgtcattaggttggagaaactgnnnnnnnnnnnnnnnnnnnnnnnnnnnnnnnnnnnnnnnnnnnnnnnnnnnnnnnnnnnnnnnnnnnnnnnnnnnnnnnnnnnnnnnnnnnnnnnnnnnnnnnnnnnnnnnnnnnnnnnnnnnnnnnnnnnnnnnnnnnnnnnnnnnnnnnnnnnnnnnnnnnnnnnnnnnnnnnnnnnnnnnnnnnnnnnnnnnnnnnnnnnnnnnnnnnnnnnnnnnnnnnnnnnnnnnnnnnnnnnnnnnnnnnnnnnnnnnnnnnnnnnnnnnnnnnnnnnnnnnnnnnnnnnnnnnnnnnnnnnnnnnggattataaacattcctgccagttgtcttcacaaccaagctatcacagccctacaaaaaggtgtcattaggttggagaaactggaacttccatttgataatatgggctgagtgactatccttctggaaccttgagaaagactcatacttcttaactgagaaattcagtagaagatttggagcaatggaaaagatgcttagggaaacaagttggcagccttgaaaaatgaatcttgctctgctagcttgctcagcttcatccatggtaaatccccacagtctctacatggtaaattaattcctttcaatctgttccattgtttcctttatgttagaaatatatttgtatcaaaacaatttatataacgttattatctgcaagaggcaaagggttaagagactgggtaaatcaaaggataattatttggagaatgggtaattcaaaatagaaagcacagagccattataatactcataataaccaagataaaaacacagaatggaacaatcagcactcctcttgtaaacattgcatcgatgaggatactttactggcagattcaattcaaactattggtcagtggttctcaacattgcctacacattagaattggctaagaagcttttgaaaaataaaagtacttgactcatccctcataaactctgatttaattatcctagaccgggtcttggacatctgtgtactttaaagcccttcaggtagtttaattgcatgtccagggttgagaatctctgctatggctatggctggaaaccatctgtcaattgttcattttcccaaatgtcatagaaatacctcacaatagaaagtggtcattgaatttggctgcattagtcattctcattacaagatggaatttgaggaaactatttgaaatattccttatatgttcttgacaagttgtatttaggaatttctctgttttcctttttcagtacttgaagcttttatttgaattactttttgcttacaaagtttaagacggagcttgaattttcagcttcatttaaaatcatgaagagaagtcttaagggagtatgtcgtcaacctgtggaatgttccactagagaattgcggttttctcttcatctttgaaactacatgtctaattccatgttattagacattccattaaaaatgcttcttattgactctagtgttcttttctgatgctcatgtttttttgctattttgaggaactcttctattcattcagttgtttaataagagtcgacaacatgccaagcactctgaaaggcactcaagattcagtggccaaaaacaggcacagttctgcatttcagagaacttacagtctagtgagacaacagaaatatcacccaaagaactggaaatttgcactctgataattagtgaaaggagtttatagttatatatatatatatatagtgatatatcactatatataatccctatatatacaccatatatacatatgtatggcaggttcaattcaaactataggtcagttgttctcaacattgcctacacattagaatcagctaagaagcttttgaaaaataaaagtatttgactcatccttcataaactctgatttaattatcctagaccaggccttggacatctgtgtattttaaaggaaatagaagagttcctttaaaatggaagagttcctcaaaatagcaaaaaaaaaaaaaaaaaaaaaaaaaaaaaaaaaaaaaaaggcaagcatcagaaaagaacactagagtgaataagaagcatttttaatggaatgtctagtaacacggaattagacacgtagtttcaaagaagatgaagagaaaacctcaattctctagtggaacattccacagggtgacactatatatatatatatatatcgctaaatatgcatatgggaaattttaatcagggagtttggggaaactttctgaaggaagtgacagttaaatgataatttcagataaataggagttaatacacaggaggaattcaggtatcacaagatctgaaaaaaaaaagtagtaagtaatttcaacataatttggcagaatccatgagggttgtacatgttgcatgatctgggaagcgcataacaaaaagttatgtcaaaaatagtatgtttgaagtttacaaccttactaactttctactttgtcttatatttttctgatattcagctacgtatctatagatgtgactctgcagcagctggaatcacactccttctacaatttgagtaaagtgactcacatgtaagtacaaggaaaagtgcagcatagacctaagccacaaccactcttgactgataatcttggggctccagatggcaatgggagctggtttctagattgtgagtcaaaacttctgtttatgattaaattattaacctgctctcattctcagtttatgttaattcatcttcattacacctcaattccatggttggaagttaaagacaacattaaaagttctgttcttgaaccactatctgttctattactactgtgtcagcatattttattgatgtgaatatcagtgagacaataagtatttactgagtaactacttgattctatggtctgtgcaagattctacaaagctggcatattttccttaattcggaaagagaagagttgcttagtgagattagaatagtagggaatttaataaccctagttctggagttggtcagagttggattcgaacaccggcatctttgcctactcattatctacccttggacaagtcacataatctttcctagtctcatttgcaaaataagtgtaataagagctgcaacttcatgtttatcataaatatggaattatataatatctagtacctgaaaaccagtcaatataccagtcaaaaatagaataatttttctatttctctagtagattacaatctataaaaagtgttacataaataatcacattgcattattttaagtagctatgtattactaatcatgaactctattttcttgatgaagaaacaaaaatacttatctacaaatacttagtatatcctaacgttacattaaacattgtatgaacattatttgtttggttattatttacctcttaaaacaaccctgtgaagtaaatacaattatttccattatttatataagaaaaacataaatgcagagagactaaatatgttttccttggtcgcacagttactaacggacagggccacaatctttataccataaatgtatgacttaaaaattcttccctatccactacattaagatgctttcaagaatactgaggtccaagatattgcttacaagtatggtaggctaccttacatcagatcaactattggtctgagaataacttaaggagctgaattttttaaaaaatgtttgaaagtatcagagtgttatgaagacagtaagaactaagtgggcaataagcaaatcccaaaaacatcatttggttattttccccttgaggtatttcctgaattgtaagcaaaagcttaagggctaagaaactgaccagaggtttaggcatctattagggctaggaaaataaaaatctgagttcagggcttgctaagaaggattgttcctagtaaacaatccaggattttggttgagatcactaaagagcttcatcctagaagtatgggaaaactgtgaatagatcagcccttgcaaagactaaagcctagctttgaatcattaaaaaataactcaagtttgtggggcaaaaaaatcaagagaagaaaatagacaatagaaaatgatccataggaagttcaaatattggttatcggacacagactttaaaataactagcatgttcaaaaatttaaatggcaagagaaaatttcagaataaaactgaaaatgataagaaggatcagttgtaaactctagaatctaaaaagtcaataaaaaatctaaatacatgagtttcacaagagattagacatagctcaaaggagaattagtaatctggaagataggtcagaagactgtaatcagtctgaagcatggagagaaagagaaaataagaaatatatagcacaataaaaaatctagcatacctatgactagatcccaagaaaagagagaaagaatgagaaaagcaatatttgaaagaaactttccaaaactcttaagagacatcaagtcacgtatgttagaagtactgcaaaccccaaaaggataaatacaaagaaagctacatcgaggcacatcatagtaaaattgccaaaaaccaaagacgaaaagaaaattataaaagccagcaagtctgggcgtggtggctcatgcctgtaatcccagcattttaggaggccaagacaggcggatcacgaggttaggagattgagaccatccaggccaacatggtgaaacctcatctctactaaaaatacaaaaatttgccgggcatggtggtgtgtccctgtaatcccagctactcgggaggctgaggcagggaatcgcttgaacctgggaggcagaggttgcagtgagctgagatcatgccactacactccagcctgggcaacagagtaagattccatctcaaaaaaaaaaaaaaaaaaaaagcagcaagaaaataataaataatactttcaaggatgtaacaagacagctgacttttcaacagaaatcatggaacttataaaacaatagaaagatatttgtgaacagcaaaacagcaaatatctgccaacccaaccaaaagattatttaaaattagaaaaagatagatacttcaagcaaacaaaaattgagagaatttattaccattaggctcatattaaaggaactattaatgggaattactaagacaaaaggaaagccattccacatgctaagacatttctgtgcaggaagaaatgaaaagcaacaggaaaggtcaatatatgggtaaatataaatgaaccttgactgcacaaaatgaaataatgtcttaggggatttaaaatactgttctttgctctgcatgatagtgtgggatcataaaattgtgcagactgaaactgtattaagcagtcttaataatcaataagaaaaattgtgttgtgacttctaaaagcttttatgaaaacattaaaatttctcagtcagttataaatggaaaggaaaaaataataaaactaatatttcacatactgtaattgtcaacattagaaatacttagaagtaaaatgctttattgctttgtaaaagcttagcaagagtagcttagacagtgcttgaccttttatctttattatataagctacaagagaatatcttttcaataccctggcaaattgtcatacttctttctaagtctagattagcttccatcattttatcctttgctttttaaatattataaaatattttcaagtgtttctttaatgtaaaatttttttaccatcattgtttcttttgggacatcttcatcctttgcatccatttttctcccatcactaagttcctctgattaatatctagagtttctcagccagcctggacaacatagtgagatcttgtctctaccaaaaaaaaaaaattagctgagcatggtagtgcaaaccagtggtcccagctacatgggaggctgaggtgagaggattaattaagcctaggcattccaggctgcagtgagctatgatcacaccactgcactccagcttggatgacagagaaagagctggtctctaaaataaataaataaataaataaatagtctcagatggtggtggtatcaacattttcatgccagtaatttattctataactccatttacattttgtttgaatttccctttcagtaacattacatttcatttcttggcttcattttcatctttattggtaaattcactctttcaattagccatttttaggaaatgtcctatgaggtgattactgggaaacacataggaaacacaatgacatgctttattgtttgtgaatgaactgagcaagagatgcccagtgaacaaccatcaatgactttgaaaggagtgatgtagttggtcacctattataatgtgcatctgttatttacatagtgatttgtggactgaagagctagcaacaaagtttgtactttattcaatgattaatagttaatatactatggtaactgaaacttgagggatgtgttgaggacagttattatttacatttgattaaatcatggtaactgaacttcatgtgtattggagccatgcaaagtagaactgcttgtatgcatagaattaaaatatgcagtagctttttaaaaaaagtataggacattataaataatgttaaagtgttctaaagatctttgaattatctgagaagtggtaaaagtactaactgaaattaaactttaataaatcataaataaatgttttaactcacagggcagctactgaaatgcttgtagaagactggaaaactaacaggctaatagtagtggggaatggaatgaaattaattaattaatacaaaaaagagagaaattggaagaaatagagagtttctggaataaatagtagatttaactccaaataatcagcatttacattaactgcattaaatgtaaaaggactaaatactctaagtaaaatacaaacattgattggtgaatttttaatactcgctgtatgctgcttacaagagacattttaaacattatacagaaaggttgaaagtgaaaagataaaaatatataaaatgcacacagtaactaaaagaaaacgatgtaaatatacatacatataaagcataaagtcttactctaagggacacttcataaagattaaaggaattactatataagatatagtgattctaaacttaatgtctataagagcatagcttcaaaccatataaagcagaaattggtagaactaaaaagataaacaataattggcaatcatagtgagagcttattttaatatagttttatcaataattgatagaacaagcataccaaaatagtaaatatactgataaaaagttaataaaaagatttgaacataatttacaaacttgatcatattgacttataaaaaatattgtatccaacaactgcagagtatatattcttttcaaagacacatggaacatttactaaaattgaccacatgtggggccataaaagcaagtctcaatagattaccaaaaaaattaaaatcaccatgttctctaactagtaaataacctaacttctaaataactccgatttctaattaaccataggattaaggaagaaatcataataaacattagaaaataattttaactaaatgataataaaaatatgacatatcaaaacctgtgggatgtagtcaaagtcatacttagaagaaaacatatagccttaagacaacatatattagaaaagaaggctaaaaataaatcatttatgtatccttcataagaagtttatataatagagcagtacattaaaaccaaagaaagtaaaataacactgaggcccaggaaggctgaggatccagtacagtaaagacaacaacagtcttcaaaattgaaaaccaaatcttctgactccaaatctgatatccatttatcaaaccattttgcttctttgccccttcaccaaaaacaaaagcaattaatttgtagtgaagtcctatataaaccctattgatctgaaaagcagtcattttgtttgtattatgatctttttcctcacaaagattccagttgttatttataagtttttttaagtaaatattcagttctctactctgagaaaaagtgttaacttcctaaaccgaaggaaactattaaatacagtaattaaaaagagaatgagtttaaaaataaattattaaaagacaatttgcttatatacttgagatattgagagtctaatatcttaaagatttaaaggataatgcaccttgtattcttcaaatgtttctaatatgtatctgacattattgtctgcaaatgattttggtcagcagaaaagattagtgaagatttttgcatgcatgccacccaaatgtttaatacatttgttttataatcattttttaagcagtgactatatacaaagcattataacttgcatgagaaaaatagagctgaaagatcactcatctttgctcaaggaattgagaatcgttttgtgggtataaggcatgaaactgagtatcgatatagaatgatttgtttaatttatataccatataagtaccatcaaccaaacgttcctgggattcctcagtatagaattaaagccctctgatttgtttaggaaagagagctctttattgtgttggatttgctgcaaggatagatatgtagatactaaacttatgaatacacatttcaaatgccaatgcatattgccagcatttattgaaaagctccaatgaggactacagcagtaaaataacataatgttattccatttcataagtgtgttttctttctaagctgcccttcaaaactgactttttttggtcctgtgatttggtaaatagaaagatgagcagttagtttaccattgccacttctaattatccctgccggtacctgtccagtcttacagagctctatatgagctctgagatggcttcccaattcatgtttagattttgttctgtgatatgaattagagtattagaacataagcactctttagcctaaagctgcctccttgtaaatttggcctaaaggcctctctgtatgcagtgaactataacctaactggatatgtgaacagaccacagaccataatttacctttttaccaatcaccgagtttcagccagtcacaggcgaccaattgttcaaacagtgttcaaataaggcaaatgctaagctataaccaatcttgctgcttctatacctcacttctgttttctgtatattaccttcttttcatccctcccagctccagaaattctctatcacacagcagcaccaaagtctctctgaacctattctggttagggggctgcccaattaatgaattattctttgctcaattaaactgttaaatttatgtaacattttcatcttaacagtactgacattgggtctgtgacctagaattgtcattcccaaaacaaaaagctattcattcaataaatacagtatgtttaacacagttaaacctgtgaccattgcatctttttttttcttttattattatactttaagttttagggtacaagtgcacattgtgcaggttagttacatatgtatacatgtgccatgctggtgtgctgcacccactaactcgtcatctagcgttaggtatatctcccaatgctatccctcccccctccccccaccccacaatgtggagaaataggaacacttttacactgttggtgggactgtaaactagttcaaccattgtggaagtcagtgtgtcgattcctcagggatctagaactagaaataccatttgacccagccatcccattactgggtatatacccaaaggactataaatcatgctgctataaagacacatgcacacgtatgtttattgcgacattattcacaatagcaaagacttggaaccaacccaaatgtccaacaatgatagactggactaagaaaatgtggcacatatacaccatggaatactttgcagccataaaaaatgatgagttcatgtcctttgtagggacatggatgaaattggaaatcatcattcttagtaaactatcgcaagaacaaaaaaccaaacaccacatattctcactcataggtgggaattgaacaaggagatcacatggacacaggaaggggaacatcacactctgaggaccattgcatcttaaaaggctatatgcaagattcaaaatagtagatcattctgttcttattcatacctcttcccttgacctctgtgatattacaatcctggttggactcctatcatgctggtcagtctttcctatcatcttttgctggctgcttccccttcctcagctataattactgggctttcttatggcccaatcctgtgtagtcttctcttttcactctaccttctcctgctatgtgatcttatctaacaattcccaaatttatatatctagttcaggccctcattcttagtgttggtatatacctattggtctacttgacctctcttcccagacatcttacacatatctcacattttatatccaaaactgaaatcaattgtcctcctgaaatctactactcctgtgtatgttgagccaataaatgccaacttccttcgtcctgatgcaaatcccaaatacctgagaggtatcactataccttctttcctcatcacccacttctactccttcaccatgtcctgttgattctactaccctaatatatagaaaatgtatcctcttcctctccactgccaccacccttatttaagccaccatcatctcttgtttgaactatgataattttatatcttaactggtatttccaattgatttcctctaattcagtatcttcacagcagccagaatgatttttcttgaataaaatccaagtatcttaacataaacagccaggcccacaagttcagctggttcctgcccacctctgcgttctcatcatgcttcactcctgcacacctgtgttctttggttttttgaacagtccaagatctttctcacctcagggtattcacatgcttttgcctctgcctagaaatttatttctctctctctctttgcctagttaactctactgattattttttcagcctaattgtgacctacacagagacacatacccttcagcccacttctgcatctaagttagatccccatttgaatctatccttgaatgctttttggtttagaacttactaaaatttagtatgacaatgcagatgtatgataataataggtctctgtaaggcaggatgctttgtgtgccattcacctacaccaagctgtgaggaaatcaaactaaaacaaaaaatgaaacaatgtattctgaacatgcattttaaaaataatggattggaagagtaggctagtctgaattcatgaaaaatctgattgacagaatgtttagtgtatgtgtgtacacacacatattcatacatatatgtttagccaaccttaattgagcatttaccatatcccaagcactacactaattgctcaacatacatatactcatttaatcctcacgacaattctctaaagtagttactatcattttacagccaaaacaactgagattcaataactacatctttatatttaaaatgcatttcatgtaaacatcacagaattggatcttgcttttatatccagcttgaaaatctcagccttttaattggagtgtttaatccatgacattcattgtgattattgatatggttggatttcggtctactattttcctatttgccttgtcttctctgttctttgttccttatttctcctttgtcttcttttggattaatctagttgtttttgcttttgtttattagtattctattccattggctttttagtcctttgcaaatgttttgtgattactcaagaaattacgatatgcatccttaacttatcacagtctacttagaaataatattatattactccacatatcatgtaagaaccttttgaaattaaaattccatttaccttcttccatctttcatgctattgttgtcatatattttattcctatatatgttataaacctcataatacattattatgttaactttaaagattcaattaacttttacataatttgagtaaagaaaaaaatagtcatttatatacattcaacatatttaatatttccagtgtccatgcccttctgtaggtccaattatttccctttagcccaaaaaacttttagtatttcactgtggttctactggcagcaaattttctgaggttttatttactgaaaatatattttgccttaatatttgaaaaacacttttgctgagtatagaattgtaccaaagccatttttgtttcagccttttgaaaatatccttcaatgtcttctggccttctttttttctgatgagtagtcatatccgtgttattattctcctgtaggtaatgtgttttttcccctctggttacttgtaaaactttttctatatctttgcttttcaactgttaaatcataatatgcctaggtgagtttttttatatttaatctgcttaaggtttgctgaactgcgtggatttatggattgctggttttgttaaatttggacatttttgtctactatttcaatagagtatgttagaagtgatacaatgccagttctagtcccagtctttaaaagaactggcagcttttactttatatccttggaaccctgaacaaccgtgtaagacgtccaactgcccagatggagagaccgtgtgggaagatcctgagatcctgggatagagaagagcctagctgagcctaaccttctagcaattcccatcaaaaagccaggcatgtaagcacgcccttttggaccctccaaattgttccagacaccagctgaataacacccagtgatcctggtggaggctacatagagcagaagaatcacccagctcagcactgtctggcatcctgatccacaaaattgtgagctataataaaatgttattttaaccacttaatctggggtaatttgttatgcaacaataggtagccagaggaagtagcaattatatgtcagttaacaatgggtaaaggcattgaggatttgtaagaaaaaaatacaagaatggtaggttctctgtgagttattcaggatcctaagtggatacaaatcatttcccctgggtagtaacttcagcgaggatactgtttggaccaaaaagtatgcatgtaataaagatttatatctgcaaaatgatgaaacactgaacacttccattttctattgtactttctctgtaagaaagtcaataacatacagattgctgctgttgttactcctaataataatagtgaccaagttctgaatgccttttgtgggccagcactccactaaaagtacttcacatacactgtctcactagtttttaccaaacgttagtttctgcgatgtcaaatgaagatggtaatacataccttgcagagctcttgccaaagatttcttagctaagacatttcaaagtgagaatttgaacccaaaagtgtctgcctccaaaaccactgcaatgccataaaatctctttaattaaaatatctgcaataattaaagaaaatgctggccaggcgtggtggcccacacctataatcccagcattttgggagactgaggcagaaggatggcttgagcctaggagtttgagaccagcctgggcggcaaagtgagacatcatctctatgaaaaatattttttaaaattagctgggcacaatggcacttgcctatagtcccagctgctcaggaagttgaggcaggagaatcacttgagcctataaggtcgaggctgtagtgagccatgatcgcgctacacactccagcctgggcaacagaatgagacccctatctcaaaagaaaaaaaaaaaaaaagcaaagaaaaagaaatgctgcnnnnnnnnnnnnnnnnnnnnnnnnnnnnnnnnnnnnnnnnnnnnnnnnnnnnnnnnnnnnnnnnnnnnnnnnnnnnnnnnnnnnnnnnnnnnnnnnnnnnnnnnnnnnnnnnnnnnnnnnnnnnnnnnnnnnnnnnnnnnnnnnnnnnnnnnnnnnnnnnnnnnnnnnnnnnnnnnnnnnnnnnnnnnnnnnnnnnnnnnnnnnnnnnnnnnnnnnnnnnnnnnnnnnnnnnnnnnnnnnnnnnnnnnnnnnnnnnnnnnnnnnnnnnnnnnnnnnnnnnnnnnnnnnnnnnnnnnnnnnnnnnnnnnnnnnnnnnnnnnnnnnnnnnnnnnnnnnnnnnnnnnnnnnnnnnnnnnnnnnnnnnnnnnnnnnnnnnnnnnnnnnnnnnnnnnnnnnnnnnnnnnnnnnnnnnnnnnnnnnnnnnnnnnnnnnnnnnnnnnnnnnnnnnnnnnnnnnnnnnnnnnnnnnnnnnnnnnnnnnnnnnnnnnnnnnnnnnnnnnnnnnnnnnnnnnnnnnnnnnnnnnnnnnnnnnnnnnnnnnnnnnnnnnnnnnnnnnnnnnnnnnnnnnnnnnnnnnnnnnnnnnnnnnnnnnnnnnnnnnnnnnnnnnnnnnnnnnnnnnnnnntctcctgacctcgtgatcctcctgcctcagcctcccaaagtcctgggattacaggtgtgagccaccgcaactggcctatgtgagttttttaaatcaaaaataagtgaaaaattttacaactgggataggtgaaatgtgtgacttatgccttatagtataataagactatattttgctgatccactaagttgaatcaagtggatgcatcagaggtttcaaaatcaccagctttagcaccaatccttaaataatcatgaaagtagctgtatgcacctgccaggcaatttagagaatcacttctataatgttctatttttagtggaaaatctgctgataaatttaaattttcttcaatgtgctttaaaaatctgaatacttataaactctcctcaatatctcttatttttaatttctcaatacattaaaagatacatcaaatcatgaatattgccttttggttatagattatttctttcctccagttacatatggaatgttaataataattcattaataattatcaaagaattaagacttctctcattgaaaatcctcgataatgtaggaaataatttattctgtgaactttcatattatagattaatatgaaaagtaagtgctagtctaacaatcaaggctttagaaactaaggtctaatctataccaagagctttgacagacttttaacttttgacccagtaattccacttctataaattttccctaagaaaatagagtagtgaaaaaaagttaatgtaaaaagccatttgttttggagttaattatttatattagagagaatttgggaaggacttaaatgcttagctaagagaatggtcaaatatgaaatactaagccaggcgcagaggcacgaacctttagtcccagctacttggagactgaggtgggaggattggttgaggtcagggatttgaggctgtagtgcactatgaccctgcctgtgaatagccactgcactccagcctgggcagcatagcatgaccctgacttataaagagaaaatctgttgctatagacaacttaatcacataagaaacgcttttgtcattatgttatttaaaatatatatgtatgtatgtatgtatgtatatatatatatatatacacttaacagaacaaaatagtttttctctgtattatcaaatgatgggagttttttttttacatttatcagcttattataaaggatattacaaaagatagagatgaagattgcatacagtgaagtatgggggaggggcgcagagcttccgccccctcccttggcacaccaccctccaggaggatggtcagctgtcagaaagttcatttcctttttgtatgaatgtgtttcaaagttttttacaataaatatgtattagctctatagtcagatgaaattcactttttaaagatcactgtgcattaaacttgaaattaatacttgatgtcaagatacatcagtaatgtattatgtgatagaaccctgtcctaaaatgttaccttaaaattaatttacctatttattagtctcaggtttcacctagggattgtatagcacttaaaaaatttatagtaacaaaatgatggcttgggcaatatatacacatcttatttttaaaataaatagtaactatttccttataccacccagagtatgcagcaaagtgcacctaatagatgtccagtaattattcacttatattctaattaatctcttcccactctaaccacttgagtgagcaaacctagtcaaaatcaaggtgactgccttccatttttttgaactataggtgaggtgggaaattaaagaaaaataaaattaaaaagaaagagaaataagctttcctatattaagctgacttgtcccagaggcagcaacaggcacagcccagacccaggaaaagtcttgataatactatttaatgtgctctggagactctcccagcactccctcaacatagggagaagaaaaacaaattttcctttgttttatggaataagtttatagatacttgttctctgtcactagtgacttcaagtattctgttttatctaagaagtacaaagaaagtcataagaagcctgagtaggcctgaactacagctgcctgggcaccatagtgaaggttatgagataaaccagtgcaaggctctttagagcaaaacctagataatgaacatctaggttgcttggcaacggtcatgtgcaatcctgagttggtcctgcctctgtatccctgctttcacaccactgtaagcttgcttcaagctagcccacccccttttgtgaaatgtgtataaaagtcaagtgctgtctttgttctaggcccagtctttggacattgagtctgctaagtccgagtgcactcaataataaagatatcgtcctgtatacaccccaaggtctctttctggttctcctgatcccacaacacaggcacttaaaagtaaacgggaaaaaaattgaaaatcaaattgaaacaagagttaaaaagaagctggggactggtggagagctaggcttttggctaatattcttgttcaatttattgttttgggtaacaataaattggctgtggcagcttctcttctgacatcatctaactgagtcttcttggtttatgctggtctgaagtgttctcatccccatctaattttgcagatgaaatgcaaagtcggctttttgattgccctcaaattgtttcctggcttggcatgcttctcactcattaactgggcagtttagggtgtgggggtgaggagcacagtcaaatgccacgatccaatgcccattgaataattgaggtaggaagggggacactaggaaaatggaaggaaattagtggttggaaaaaaaaaaagtcttccttaacagaagactttaagtcttttccccttcttctgttcttcattccctcgcctgagaactcccttctctcatcctgctgatttcccatatactctttgaggtgtggactcagggactgagtgcctgctgcaatgctagtcgtaacgggaaagccagttgtcctgtgctaggcttttattgagaattaataaatgtttcttagaggaagaaaaaaaacccagaatgtagacatgtgattaagtgaacctaactgcatgctgaattattgatctgttgatttgtgaaaactgccattggacagcaatgttacacttttcatctaaatgtttatttcatttgaaatctaatgaaggagaattagacaatgaatatttacatatatttttagttctgccggatgatctccttgaaacctcgtttaaaaaaaaaaaaaaggctgtattcgaagtcataagtcctagataaaggcccagtgttgcctctaagtgtataacaggagattattcacttgccctttcaaaacatgtctccatagttttgtctgcaaaatcaggatgatccttacctgcatcacacgagtcagttatgttgttccctcactaggaggaaattcacaccctccctcaggtgaaaaaaaagtacactgtttctttttaccctttaatcttctgtattaatttgtattcatgcttctatgaagaaatacctgagactgggtaatttataaaggaaagaggtttcattgactcacggttctgcatggctggggaggccttaggaaacttacaataatgacagaagcggaagcaaacaggttctttctcacatggcagcaggaaagagacatgcagagcaaagtggggtagatccccttataaaaccagcagatctcatgagaactcactcactatcacgagaacagcatgggggaagcaccctgtgatctaatcacctcccacgaggtccctcccccaacacgtggggattacaattcaagatgagatttaggtccctctcccaacacatggggattacaactggggttacaattcaagatgagatttgggtggggacacaaagccagaccatatcatcttccaaagctgaatttttctaatcaatacgctttaagagccttgcatatttccccagcaaagaaaaagagcctcgctccataaaacagcatacttaagcagcatatctggcacatattttaatgttattttttatagagaatatataaagctttacttttttgtttttaaagtttgagattttttgcatcctctttattacttttttttgattgagataaaataaaaagtgaaaattccacattccttctttttaaacctatctgctagacgtgcccactatgaacagagtactctatatttttggaattttatttatgcttattagtttgggtaggtgaattactataagaaatagacaaaaatacagacatgttacagcccttagtgagtgaggtttactgcttgctcatgggagagtactggatggatgagtgggagcgcagagcagccaccttcaggcagtcactcagggcctcaggttgctggaggcacagccatcttcagctctggagggcatctccattcctagtgtgctgtattacaaacagcttttctttcttccaatgtctccagctttctggcagcatagctagcctcctgcacactcaggccataattgcttaactcaaaatggtgtgattcaaattcaccctcacaggcatgcttgaagacattcaaatttgaacgcctctttcacccttctctgattagatgttcttttgtactcacttctgcccttcctttcttcctatctttgaaaaggttttactagttgcatttgcttcttatgttacctctctatttaatgattgattgattgattgagacagagtcttgctttttcgcccaggatggagtgcagtggcacaatctcagctcactgcaacctctgcctcctgcgttcaagcgattctcgtgtcttggcctcccaaatagctggaattacagacataagccaccacgtccggctaatttttgcatttttagtagaaacagggtttcaccacgttgcccaggctggtctttaactcctgacctcaactgatccacctgcctcggcctcccacctgcctcagcctcccacctgcctcggcctcccaaagtgcttacaggcatgcgccaccacacccagctgttatctctcaccatttagctaaactactggcagtctacgaccactccaccccttctctgcttcaggagatacttttcaaaagtcacttgtgagcaagtggtaagctgttgccttacctcagaaagcagcttcttttccctgctgttttcttgtggggtctctcattcatctttctcctttgtagctcttacatttccttccagaaatcttctcctctttcatgtttccttctctttccttgctgcctctcccgcatttctcctcttccagcctccatgtaagttgccagcctcatttaatcaactgttactagcagctgcatttcatttcccttttattctctaccttttcagctgaccaggtgggctgcattttcttttactctgacgttctcttagaccactcactcaggactactcgttcaacgacagtctcttgtggagcaattttccagattacaaaccctgctcaatttccaaactcctgcatctagtttacatctgtttgtctctggcagaagttcaaaccctcctcccccagtggaaagctctggcaaggagtttattgctcaccctggaaagagagaaccacctcaacagagattgatagtctctagaggggcaaggtgggaaaattatgagattttggagtagggtggccaactgtcacactttgcccaagacagagggaattccaaggatatgggctttgcattttaaagccaggacaaaaaatgaaagattgtataaagaggatctttccatgcagggtcttgtttaggtaaaaatcatgacataatagtttaggattagcatagtgaggatttggaagtgaggagttctaagatcttggggtataaactgttgatgctttctgttgaagcattgatggttctttgtttcaaaaactctctgtaatgaacaataaagcaatttgcctgggcaagagcctcctggaattgtagttatgttaacgaggacaatggaccagtaagggtatattattatagacagtaagctgtgtgtttagggaggagagagttaggtgatttctgttctcagagttaactccatcctctcttttccaaggtctgtttcatattcagtgtccttagttgaaatacctagttgaaaaaaccagacagttttttctaattttgcaagaatgtcacaacatctccagtcccaagtccctgatgtctcttctagctttcattgcacttatgaaaataacaataataaaagcattatttatagagccctaactatgtggaggccaaacataaaacccctcatgaatattatttaatcctcacaaaagccccacaaaagaggtgttgttaattgttcctattttacagacaggaaaactatggctcaaagaggccaagaaacttgtccaaggtcatataatcagaagtggcagagccaagactctatcttgagtccatctgggctattcagaaataaaaaggagtgaactactaattcatgttacaacatggatgaacctcacagacattatgctaaatgaaagaaggcagacacaaaagactgcctgttatatgattccatttatatgaaatgtccagataaggcaaatttataaagatagaaaattgatcagtggtttctaggcataaaggagcaagtggaaactaactgcagatgggcctatggttactttcatcattgaaagaaatgttctaacctgtgatgatggtttcaaaattatgtaatgttactaaaaatcattgaactgtatgcgtacatacaatgtttgaagtttatggaatgtaaattctttttcaataaaactttaaaaattacagaggtcacattctaagctttctgactggtaccaccaccgactagatgctggttattttaggtgccactcctaaggagaaatgctaaaggtttactgggttcttatatacttttcaggtaagcatagggaatgccttaaactcttttagccaatcaacctatgttgaatatgtttaatttaaccagtgagagttcatttctagcagttacttatttctctaatgctaactgtgcattcttgatcagcatttatataaacctaagtatgtaagttactgacacacgatattgcactatacatgcagaagtgtcttcgattgctgacatgacaaaataaacccaagtgaactgtgaagacttaccacttctgtacatctggtatggcaatgacagagccttactgtccatcttgctgtgctgtcgttcatcataaaattccctcatcctcccactccaacactcattgtcttggccagaatacttataaataataaagatatttgtcttcaactcctcaccgaatcattggagggatttttcttttttctctaaatctaaaagaaaaaaaattctgatactacaattaagaacaatgtagcccataaattaaaatggacggaaaccaagccaacaacacaaaagagctgagcagccattgggtccctatgaggagacaggagtagtttgtcgttgatgggacccctggcagctacagtccctggggtaccctgtggcgtaaatacatatttttctcatgaacgtttgttaaaactgatttatgttgttttgtctttgataagaacagatatggatgtattatagtgactgtgttccttgtaacttatacagagaaattcggaataccaggaacttaacttacatagaccctgatgccctcaaagagctccccctcctaaagttcctgtaagtattaaatcctctcccatcctacttttctggggggagggggtcagatttaatgctgttgtctcccaggaatctccctagatgatgtggtccaggttcattttaatggtgtatagcctgggtcgggggcaaggtatcgggtgaaatgatccacatttttaaaacctattcaaaagtcagcacatagtgctggaaccagagaactgctccaagaaacaggagggagaaaatgctatcatgtatatgtggtccttaaatgtagtatttcagaacaaaacaaaacaaaattctgagagccagttggtcaattttgtttgaaaatgggtatcacaacaatattattagagtggctgttacacaggaaaaaaacccacaaagagtaaaatacacttctgtggggagtggagggaaaacagaagggacaacagtttcaacctcccactccagcactcaaatgtccagcactcactgctttgctttgaaaacaccttatgagctaaccataagctccatgaatccagggaccacaacattttttttctctgttgaatctttactgcctagtacagagtaggcgctcagtacaaatgtgttcagtggatgtgtctgtatgacctcaggccccctggataccaggtagaagagtcctttttcctacttgcatgcattataaagattagaaaacaaagagtatgaagaagaaaattgttaaaaaaaacttaatcccaaaccccaaaataagcactattaacatttcagttcatcttcatccagaccttcaaaacaaacttatgtaatcatagatattttatgagataagcccttaaggatgaatagagggtatcttgaacaagaatggggagatagaaaagaaatttagctggatggaatagcatgataaagacacaaacgtagggaaccacgcagcttctttggggaactaaaaatagttgcttttttttttttttgagatggagtcttgctctattgcccaggctggagtgcagtggtgtgatcttggctcactgcaaccgccgcttcctgcattcaagcgattctcctgcctcagcctcctgagtagctgggattacaggtgtgcaccaccatgcccagctaatttttgtatttttagtagagatggggtttcaccatgttggccaggctggtctcgaactcctgacctcaggtgatccacccgcctcagcctcccaaagtgctgggactacaggcatgagccactgtgcctggccaatagttgtatattgaagaggtgggtgtgagagatgccaggggaatggaagacactgatgggatatgaagatgaaaggatgtctggaaagccatgaaagcttatgggacaagacaatcactcttcttatggactctgagtttcaaataatataataaccctttggtgtgatgatcccctactatatgctctgtggggaacatacaggtttctaagacattgtccttgcctgtaatctagttgaggagatgtgtatgaaattgaaaagtgcctctcctacaaaagaataatggaaagtgacgaaggagagacatatacagtgtttgggggttcaggtaattagagaagacatcagaaagaagacccacaggatggttttaagggacttgtttgagatttttgaagaatagaaagatcttgatccaagtatatggaccccacttgactcttggacctttttccctcctactgttcttcatgagcacctattgcaattgaactagttcgtttactgtatttcaaatataccttatggaatctcacctctctcctttgttatctggaatgtccctcccatttgctgattttgagacctctggctcctgctgcctcttcaaatcctatgccttcttctctagaaggagtcaagtctgaatttgcctcagaaggtgtatcaatggatatagtttttctaccagaagaccttctctagagctttactgagtagtgtctagatctcactctatgccatgccaaattctcaaaaaaaaaattctaattacattcaagtagctgcaacaaatgttaaaacaactaaatctgggaggcatcaggagcctgagaattcttgtattcatggtgttttatgcatgtcttttaatcttaacatttttctgtagatgatataaactacagaaggtaaagactttgtctttgattggtttccttccttttctggacactgtctttttttgagacagagtcgccctctgtcatccaggctggagtgcagtggcatgatctcggctcactgcaacctccacctcccaggttcaagtgattctcatgcctcagcctcccaagtagctgggattacaggcgcatgccaacacatgcagctaatttttgtatttttagtagagacagggtttcgccatgttagtcaggctagtcttgaattcctggactcaagtgatccacccgccttggcctcccaaagtgttaggattataggcgtgagcccctgtgcccggctctctggacatatttttttaaatggtactgttataatggtactctcaggtcactgctgtaggaaagctattcttggcaaaataacagcataatataatgtagaacttgaaagaggaagctggcttaaagtcatcatatcttcctgtcccatcttcttcttagcccttcactaacaaacacataattttttccaattaaacaagaaaatcacacacacacacacacacacacacacacgaaaactgaatttatatttctagtaaacccacttggttaaaacaatctccagagcattctaagccgagcagatgtattgacaccagtggactggattaaattattatgccttgagggaatatcatctcatccaaccatcagaacttgcccatagttactcagatatttagtgaaggtgttgggagtttgactacaggttgtcttcagaacccatgctttcagctattacattattctccttcctatgtgttgatttttttacctaaattctatgcttttttttctctttttttcattaatttagtggcattttcaacactggacttaaaatgttccctgacctgaccaaagtttattccactgatatattctttatactgtaagtatgcacacatgccatgtttgacaatattttgtttgtcactgacaagaactagaatacagtcatgggggtaggttgaagataagtaaagcaattgtttcaaggactaagcaatgatcaggtgtgactacactggcatgaagtaaggcaaggactgagaaataaccactggctttagcaatgtggtttgttggtgactctgccaagaacagttccagtggagtgctggttggagtgggctcaagagagacttgggtagacagaattagaaagagttaccataattaactcttttgagaggttttactattaaaaggagcagaaaatagctcagtaattgcaagatattgagtcaggagaaaagattttgtttgtgtgtttttgtttttaaatggaagaaattatgcaatgtttctttgccaatgggaatggttgaatagaaggaatatttgatgataactatgataccttatttttcatagagttttaatagttttttaaacactttcccacacatgacatttgctcctctcagccaccttataaggtgtaaaacaaagttactgcttttccatttatgaatgaggaaactgaggaatagaaacctcaagtgattttgtctgagcagtgtctcaaggaacagtcaggagtggtacccaaattactgcctgtgacctttgattggcacccatgtgccctttttcaaagctggtgacatgggtcagttgtcttactaattgtataggaatgaaaggacgtaaggcagagagaattacaagttgagtttgcattaaagagtcagcaaaatgtagaatgataagcttcaaactcttggggttttgctagaaaaaaaaattgatcatacttctttgttgcaaaagagctcagttcaaaatgtaagcaatcttccagaaactagaatggcatagaaagtttctccaggagcctggcgaagtttggcaagtgaaggacattttagaaacactcattaaatgaaatcctttaatccttttatcctgaccttcttaaaggtccatgcatgtagaaaactctagttgttgtggacaaagtgttgcagattcgggagaagcctctcaaatccatctgcctaccccaagatgaggattaagtcagggacctccacccccacctaaagctctcacttaccccacatttgggctccaggtgcatgtcatctaggacagctctcaccacctcaccagacctctgagccactagcagttaagaagggtcagtgaaacttaaaaagaaataagattaagctatattgtgtcctgttatttaagtgcatacgtgcagcaagacccctgctgcagaaggaaagcattttttcattaagtgtttttgtccctctctcttgcagtgaaattacagacaacccttacatgacgtcaatccctgtgaatgcttttcagggactatgcaatgaaaccttgacactgtgagtattaccagttctactccctccatcaactaaattctattttgagccattttcatatgtttacagaccatccaagagccatactgccttatcatatatactctatagagtataaagtgttttacataattaaataagagtattgtcttatgggatggtactctgtagactacaaaagagtttaggtaacaagataagaggattccattacggcagtgattggtacatttttcacgtgaagaaccagttaggcattacagaccatgcaacctctgtaggaactggtcagctctggcattgtgtggcaaaaacagccatactcaatacatacactaatgagcatgtctgtgttccaataaaactttatttatagaaagaggcagtgaactagatttggccttcaggccttatggaataatcatctgtatccaagtttccccattctacagaagaagaactggggtttaagcaaattgaagtgacttacccaagatcactgagttaaaaaaaagtggtgccactaagaactttataaattctgcacttacacttttactcagtaatcacaaactgttattaagctcctgtaaggggatattacatagaaagcatagtgctgctataggtcagcatttttccagagcttgaatgggggcaaagccctttagatggtcaaaagtagatgcttaattagggatattcacaaaatgttctaaaggagaagatctaatagaggtataaaggataagttaattctccaagctggtagaaaattcctctctcattgtataagtcacaaagtagagttggagctacctctgcagggtctcctctctattttcaggaccactgcccaagttcaagcctggtgaagtttttgtctggattgtcaccccagtttcatttctctgctcacactaaagttggggtggaggtctttatcagatacaaacctgatcaaattactcaccagaaaaatggatccaagcttcatacagttcttctaaggggctattttctgagccattcctagtttatcagtttgggcccaatgaagttacctcaacttctgagagcaatggagcatttcagatgatccttctcatcacaacctggtgagcggtcccttgaaaagacaaaggaggctccttctcagtcataatttcttcttaccatgcagaaaaggcccaggctcttagcctgctcagctccaaacttcaaagccatttacttcctcagtaaagctttccattgcgccatatagtgctcatcataaggaaactcctacatgctaaacttctttatagaatattacctctaccccttgacaccatttttctaaaacccccatatctcaagcacccccctcaagtgaaagctcattgtcccacacctagcatagagcccagcatgtgtttctagaaacatctgagtgagggaagcccatatttcctaaaatatagaggagaggatggcatggattattcatgatcttttcagatgattatttctacattttggcaaaagtccttgcttcttcgaagctcaggctcaaaaaactatcaacatgaaaggatacatgttccaacaaccgactttgtacctgtattcctggtaggagaaagtttcagtcaaagtttgtaattcttttgtcttgcttcaccatgttcccttttcaaggccgatttgttcattaagaattctgtttaatatctgaaatgcaattcaaacaagtatttttaatgtccaggactctcaacaaatttaggaaaattaaaatgccatatgcacagttctcacatcttcataaaagagttctagtttagaaaaaatttacttatccacagagttttctcagccattgtgcttatattcctgggatattgcaatcctcacccaggacatgttagtagctggaattaaactcgctatgtaattatttaagatgaaacaaaaacaaacacatcaacaatgacaacaaagccatgagaatcttgctcagtttcccacaactatataggataaatccaagttttaggatactccttttatttatttatttttttaattttttttttttttttttttttttgagacagagtctcactctgtcacccagagctggagtgcaatggtgcgatctcggcttactgcaacctccgcctcccaggttcaagcaattctcctgcctcagcctcccgaatagctccttttaacatggtcacctaataagtgttcctcactttgttaaagatacagttatttgatcctctctgcaaccttttgattgggcattacatttatgtactaatttatcacatttttagagataacccttgagaagagacaggttgagaaattctcaggatcatccagcctttaagtggcagagctaggtctaattccaaatttgaactttcctgtgtgcttcttaatgtgttcccaaggttcacatgtggtagattactgtagttttcaaggttcccttacaactgccactaggagttctcactagcagtgcctgagtgtggttatagctgtcttctcttatcttcatgccaataaccaccaataacctcttgcattcccatatagcccagagctcccaaggctggggctccttctcctgcagaaaggggggctgcttttggtaggtggaaataattatatttgaggttggccaggcacggtggctcacgcctgtaatcccagcactttgggagaccgaggcaggcagatcacctgaagtcaagagtttgagaccagcctggccaacatggtgaaacccccatctctactgaaaaatacaaaaattagccggacctggtggcaggcgcctgtaatcccagctactcaggaggctgaggcaggagaattgcttgaacccgggagcagaggttgcagtgagcagagatcacgccactgcacttcagcctgggcaacagtgccagactccgtgtcaaaaaaaaaatcatatttgaagtcagggatcctaagtctcaacagtcctagaccaatgtgtttttggcaagtcaccttcatgtctcagtaacttcaataggaaatagaagtaataacatttcagactggctccctgaatcattaaatgaattaattagtcatagaaacacagcaacaagttaaaacattaacatttccagcccagtggttcacacctgtaatccccagtgcttcgggaggctgaggcaggcggatcacttgagcccagaatagcctgggcaacgtggtgaaacttcatctctacaacaaatacaaaaattagccaggcatggtggcacatgcctgtagtcccaactgtttgagaggctgaggtgggaggatcacttaagcccagggattcaaggctgcagtgagccgtgattgagccagtgtactccagcctgggtgacagagtgagagaccctgtctcaaaaaaaaaaaaaaaaaaaaaaaaaaaaatccataagaggacatggtctatctactttcttagattcgtctatgagatttaatttaattgagaccataacccttaaacatttaatctgtgataagctctgaggataaaaagatggataaaatacaaaggtgaaataacatttaaatattaatagaaaaataaaaacatatgcatttagatgaatgtctttcaaaatgtttatcttaagagactgcagttgctcctccactattgacattgggttaactattacctcaaatccctttttctgaatgtatgtggaatattcttttaaaatcttcaatggtaacaagtttgttactcaaagtaaatatgattctgagaaacaccttaaatttactaggagctaagtcaggagaatgggcattcaaactgagaaatattatcttgtttccaacaacttgtactggaaagttttcttgtgggatacatatgtgggacctgaaaaacctttatgcacatttatgacactgaagaaatatagtccaactctccagaaacaggccagcaccacttctcaccagtcactgatttctcttctctctgttggttgtaggaagctgtacaacaacggctttacttcagtccaaggatatgctttcaatgggacaaagctggatgctgtgtaagtcaagggtagccatgaaaactgtcactttcccttaccctaagaaccatccaatggggcagaatgctgttgagagataggttctaccagagcatcttccacgccagagttagtgtgaccaacatggaaatgaggtcaaggaacttggcaggggcccactttagtgggcgcttacgttagctccaatggtaagttccaaagcttttctccctggtgtgtgtgtgcgtgtgtgtgtgtgtaaatgttcatctattatgtacatgaagtaaaaggatatctttaatgaagcccaaagctgttcagaaaataaggtggtttctcttttagtcctttctgacatgtttttgggaaagatgtcagtttatatttgattcactcagaaatagctaaaaaatcatatccaacttttgccttttcaaaaaataaatagtgctgggaacagctgaaacagcaaacaatagactttgtgtttgatgtgttttataacactttttgagtatttctttacaaatgatatattttttctatttcacctttttctatttgttgtttttttcaaatttacctgctcatttttgctagtgtcttgttatgtattcggttttgtaattatattatttttttcactttaaacatttcatacatagtaattttatgttccagaaatgatccctgcaaaatctgaaggccttatgacacaaaatctgttgcgtacggggcttctcaaactttcctgggcatcagactctctgagaggtcttatcaaaatacatagtctgattctgtagctctggatttggcctcgggattccgtatttctaacaaactcccaggtgatgccgacactgctgttcatagaccacactttaagtagcaagggtgaggtcaataagctgtctaaccctatgcagtggctctggatggagaagaacactcatgtagattgtgtgattttcgttgatgttctggtttaggggttaggtggtaggttctggaacaattccatttttaaatggtaaatggtaaaaaggtgtttgaactcattacactgaggcaaggctccctgagttctgtttgaagtgaagtctcactctttgctggcttttgtgcttcataccagtctttatgaaatgaagagttacagtaccattctctcgattgtctggttgtggagtcataatggttcatttccattatttttttactacataattataggcaaagtctaaaaagactctatcgagtaaggtgatacttaccccctcaaatttatttacagaattggagagaccctccttccatcttaactttatgatactaacttcttacaatctttcatctacttttcaacatatttattagacacttgcaatgtaccaggccctgtgccattcactgggaaaacaaagatgaacaggagccatgtgctccctgcccacactgagcgtacattctggtgggggtcagctcaagggcagcaacatcaaagggcaaagtacattagggagaagtgtacccaatccaaaatatgcatctcagatagaaaataactgaagcctaaatatcgaataacattgctttccttctttggagatacaagctagattttttctaggtttatcccattgttttttaaatcattattaaaattaatgttttagaaatgaactaccctatattccaggtttcaagttctttttctaatccagcattctggaaaggtggcatttgattttaatatagtatgaatttcaccaaatattttcctctttgattcaactattcctagaaagctatgactctcagggtaatgatcttcaaattcaaattttctatgaatggagtatggagagttcttaaaataatgaagatagtttgtaggtacttagggtataaagatttcagatgactgtcacacagttgtagacatagagtacaccaaaagtttcgttagcattaaggcaacaaagactcacattagcaagggcagggataggagatagtaaggaaatcttcaaccagggaaaccagagctgttaatatggctcctgaattcagtgtgttcagctgactcttgcctgaactaaaactgcctttccagaatggtggattagagaaagaacctgaaacctgggatatagggtaattgatttctaaaacattaatttttccacaagcaaaagattttggagcccaagataagaatctatgcttcaaattaactgcctgtttttcctgccgtatttagtcattggaagatatgaccctcagacactatcaattatcattcattcaagatagagtataaaattcagaccttaaggtctacagagcaataattctcaacattagggagttttcaaagcactaatgcctaggttttgccgtcagacattctggatgtagcaggatcatggggatttaaaactctctccaagtgagtccaatacagagcaaaagtcaagaactactgctgtaaaatacattatcagtcttcttgtccaattgtcacgttttacatatgaagggaatgaagcccaacaagaacacatggcttttttttttaaacgtggctattttaatttgatagagcttcctagtggccaagtcaaagctgagacctgggtcccctggttcagaactctttccctgccctctgctgggatttatcatggctgacttaccagccatcaccaaggtgtggacatccaactctggcaagtgcagcttgtttcttagccctgaagattgcttagacttcttagctcaatctattaaaggcgctaaacacagaagttaaaatatcttgatcctgaaaaaaatgagatcatgtgagagaaagaaggcaactcaaaactcaaggcataatcaggagaagtttcagaggacaatcacatcaagaaacagtgttgttagtccacgagaacctgactttaccaatgctgcaaagccattcgtgagcttccagatgaagtctagcagcttattatcttatgaccagccgtaaaattagccacagagtatcaaaggagtttagagacattttctattgaaaggatggaaaaacgaacaagtgaacaataatttctctttgagcttctcctcagcctttgtgataagagaagggatgggagagggggagctatgttcctttaaactatatttcttcaactctctttccatagtaaattaatgggtattactttttaaaagaaatttatgatcttataaagttaaacaagatatataagtggacttttcagatcttctaataaaatcatctgaattatccatatcaaagagggggccttagtttgcagagcttctcaagcagttctcagttacaggagcatctctctggtctggtgttctacagacttttgaggggaataccgcctctgataggtaggaaaaaaatcaaggtgtttttctaccatcacacactcaatacaacagttttgacaccaaatgtttggaggtttttcccccacacagcaagtaatcaattctccaatgcacaccagctggatgtcctacaatttaactcagttctgatactctacctggagatagcatcagatccacaggttaaggtctcagtcccacaagactgcctgctacttcagatgccagtcacagctcccaggttgtgtcctatgcttctgactgaccaattataaatcagggttcccccagtcccctcctcagttcagttaatttgctaaagcagctcacagaactcagggaaacactttaaaggatattacaaaggagcagctgtgtggaaaagatgcatagggtgagaggtaggaaggagtgcagagcttccatgccctctctgggcacacaccctcccctcagctccacatgtgccttgaccaccttccagctacctggaagctcatccaaaccctctcctctctggctttgtatggaggtttcattacataggcatgatttattacatcactggccattggtgatcatctcaatcttttcagcccctgtctcctacctgaaggtgagaaggtggagctgaaagtccaaccctctaattatttattgatctttctggtgaccagccctcatcctgaagctatctagggattgacagtcaccagtcatctcatcagcatacaaaagacacttgtcactctggaaattccaagagttttaggagctgtgtgccaggaaacagataagaccaaatacatatttcacaatattacactactgaagaagaatctttcgatataccatctgcttgggaagcaggtaaatttaagaaggtttattcaagagatagctgtggagattctaagaactagtaaagatttcaaatgatcagatggccttctgaaattaaccctatggaaaaagtacacaaagtcctcacttagcatcccagatagggtcttgaaaactacaacttgaagtacaaacaatgtataatgaaaccaattttaccataggctagttgatataaataggagttgagtttctatagcatatttctggtcacaaaaacaaccaaacttttgcataaggaccaaaatgcttctaatgttaaatatggaaacaaatatgagctatacatacatttaaggtaggttaataaaaacaagagaattatttgcccaattattccagttcaaggtcacaggtggccacagcctattccagcagctcagggcacaaggtgggagccaaccctgaacaggacgtcaccccaacatgggacacaatcacacacaccgccacactcacttgaactggcaccatctagacacaccaagaaacctgatatgcacatctttggggtgtgggaggaaattggaatacctggagagaacccacacagacatggggagtgtgtgcacacttcacataaacagtagccctggcctggaaaggattttattctcattaaaactaagcagcagggtgcggtggctcatgtctgtaatcccagcactttgggaggctgaggcaggtggatcacaaagtcaggagatcgagaccatcctggctaacacggtgaaaccccgtctctactaaaaatacaaaaaaattagctgggcgtggtggcgggcgcctgtagtcccagctactcgggaggctgaggcaggagaatggtgtgaacccgggaggcagagcttgcagtgagccgagatcgcaccactgcactccagcctgggcgactgagagagactccatctcaggggaaaacaaaaacaaaaacaaaaaaaaaaaaactaaacaatagtgaatgagacaatattattagaggatctgctgtatatatagagactctctgtaccttcacaccagctttctcctcagaccataccatggattctgtgggaggcttagctgacggcagagatattctgtcagtgacaatggattttcaattcactggtgccatgacttactgtctaactatcccttgaaacataggaaagaaatcagtgtactatttcacaatactttcttgacatttttatgttaagtattaaagttatttggaagagtttaacaaatgtggaaactatttctttgttaagaatcttttgtgtcttggtttctaaaagtctagatcaggggtcagcaaactttttctgggaaaagcccagatcgcaaatatttggggccttatgggacatatggtcttagttgcactacttaagtctgcctttgtagtgtgaaagcagccatagacaatatataaacaaatgagcatggttatgttccaataaaactttatttacaaaaacaagggcaaggtaggatttgactggagggtcatagtttgtagacctctggataaaagtattcagtgaggatgaccattgtgtggcgaaatatgtactctgtttctctgaatttctggtaaaggttaaagggcaagcgtgggatcaagataaaaagtatctggattaaaatatttggcgttagaaagtacagatccaatcataatagaaaacaaattttttttaatcagtattttgaatccaagctggaaactgctcctgttataaaacaatgctccatcattctaccctaagtttctgactcctagtcaatagaaatttattctttcctagatttaagcacttcagtaaaaggtatcatgtaaatccagtgtaaaatcaaaatgatggttgtgataaggagccctgggactggaggaagacaaggattgagctataggtgaaggaaagaaaggtcaaggttccatggtaataataaaatagtattcacattgtgttttaaacatagggatgttgcttttggtctcaatgctaattaagattttaaactaaggcaaacacatcaatctcctgtaattatcttaatagtgttcaaggatttcacatggcatgttagcaatttggtaatttctccagaagtttgtccaggtatcattaggttctcatttaaacaatgtgtcaaccaaaagagcaatcatcccctatcattccacttcatgacaatttactgaaattagcagatcgacctcatttacactcattttttaaaatgtaactgaataatacaattacagccaagctggacaaattccacatcgagtgcaagtgctgatgcctcagcagcagtcaagtaattagttaggatttcatgaaaatgatggcagatgtgtaaaagcacattgtcctatgacttcctatggcgccaagaacgttgtcatcactcagaggtgaaattaataataatgcaagcatcccttgctcaacagaagttgaactgtacttggtcacaagttaagtcacacattcattgtttggaatctcttttccatcctctttccacgcaatctgcgtggggatatgttgcttctcacagaacgtctgattctctgtatcacatttcctattgtcaaactctagtaactagctactatctgacagtaaacatttaggcaggaataaaaataccattttgatatgctaagagcccaccaatacactaattattatgaacagagtcaacacaattaatgtgctaattagcatcatgcattagctgattcgaagtaaaacaccacatcttggcacactgggaaaagacaatgatagagaatattataggattaagaaggctattatttatcatggggtaagtatttgaacaacttgtaggatatactctaaggctgacttttccctctgcctattgaaagcttgagtattttctcacgggttactatttacaaacagctgtcctgatttctgctacaaaaggatttccatagagcaatccagcttctctttaaactaacatgagaggtaggcagggggtccctttaattttctgaattagcaacgctgtgggaggaaaacatggttccccacagatgtgctcccatgagagtctcacaacacaatcagggcccagcccaagttccccataaagggactgtggaggcacaggctgaaattccatcttggagctgaaatgtatcctaaaactccccagagagccaagttcagcagcaatagcaaattctcttgccacgacatcacactcctctctctggcatagatcacgtctttctaaacctggtatagagggtgcctctttctaggagtcacccaacaatcaggctttcattccttcctctggcaagtctttactgaatggccgctacgtgccacgagtgagtccaacagaaaagggcgtacataaacacacatatagtacacataatactgagtttgtcaatcgaatattttcctcagctcattcctcaccaccttcattttcctgactgcattggtcttccctaactgtgaactattcaaaattttaaatcagggcagggcttcttaactccatgtatggaaatctgacatctcttttctcagaagaacttcatttcttccaacaggttctcaaagaggaataagaccccaagcggtgaaaagctgttgaacacatagagatgtagccatgtctatcttatttttaaaggaaataccagttcttttctcataagccctttccagcatagatatttagaaaccctgactttcaaaaagtatttcctttcgtctcttactacaagccttttgagtctctttcaagctactttatgttcatcttctccttgcaagggatagtttttatcactcccctctaaaataatcattttctagagtaggttaaccagatagcctgccaagatttgtgactgatttatccaagctggttacaaatgtggatttcagaagaatcaatgtaagtcatggtcaaggaatcagtttaactagactgataatcccaggaaatgtcatgtgataaatgaggttgatggaagcactttcctggatatcaaggcttctgtatatgtattttccctccccactgtcttgacttcagatggaaggcaagagcagcaagctgatgcaaggttgaaaagctaaatgaggcagccctcaaatctgctgaaggcagagtgatggtttcacttttaagcatctaattaactctaagaggtaaagtaccccaacagccatgctggttttagagaacacagtctcctgaagtgtcagttcatctccgttcagcttggccagggctcctctgcatcctcctcctcccctcctggactctggctggcttttccagtctgaagtcttctgcagagtttctggtaaactgcaatgcttatcaaccaggctccttatcctcaggagtatattaaatatcagatgaaaacactgcagaattggacaagcaataatttagttttacaataatttctaatgattagaaagaacaagctgaatttcacttgcagcagttagagatgaagaggaaaaactgagatgagttcaccagctcttacttgattttcaacagcctgggaacagaatgtgatctgcaagctgcattgtccagagaatacaaaaagagatgcaagccagtgcagcccttgtactgaacttagttgtctttttacaaaatcatgctgttcaatatcttctctgcagttgttttttttttcaaggtggattttgcccactctgggtgtcactgaccaaaggaattccatggacatagtgggttaaaggagagtccaacaatgatcaagtggggattgtgattgaagccactgggaaggcacagattggctgctttagcatcttagccaggtctctgaatgcatttgagatttattgactctccctgtgtcacacttaacaatgccctgaatactgggtgttcagccactaccagaagaggccaagtttgggctatacccttgaggtgtttgtaaaccagatgccacaaaagtcactacctcaacaagaacagttggtcaaatgccaccacaccataagccaagtcttctattttttcgctcttcatgattttttctttaaagcaatcgtctgtgtcaccctaagagtttaacactgcccactttactgtcttgatgaaaaagtatgttgatttattttctactcattcacacattcatccaacaaatagttacagagatggtgaacttggcactgggtagacatagaactttcattctggctggggagacaaacaataaagtaaacaagtaaataaggtaataattatggattgtgataatgctgtgaaagaaatagagagtgtatggaggcaaaaatggtaatggctactttagattagctagttctcaatctctatttaagaagaaaattgggccggcacggtggctcatgcctgtaatcccagcactttgggaggccgagttgggcagatcagttgaggtcaggagctcgaaaccagcctggccaacatggtgaaaccctgtctctattaaaaatacaaaaattagccgggcatgatggcgatcacctgtagtcccagttactcaggaggctgaggcaggaggatcgcttgaacccaggaggttgcagtgagcagagatcgtgccactgcattccatactgggcgacagagtgagactccatctcaaaaaaaaaaaaagaagaagaagaagaaaattgaaagacccaaaaatatataccaatttatgacatgtcattttgtggagtctcagcacttactcgccatttagtgattccctcatcctgcacagaaaggagagatttcttcagcactggtgattggtaaaactcttcttcctcccacggttccaacgaagactcatgcctgggtccagttaaccaggagggaagtttctctgtgagggctctggagaagaaatccttccgactgaaggcttaatattattattaaccattacccttaaaaatgttccaccatgaagagcaaactccgtaagtagaataatggaagcattagccatatctaagcagaccttctgagggtctctgctatattcttttgcatcaacaggtggccactcactaatgtttaagtggaccaggttatgttgtgagttattctaaatgtgtaaattgggagcatttgtaacaaggatatatatatgtgctatgcttctttttagataattttgttgtgtaataaagttatggggaaacagccagtttcaaaatccttggaagcttttatccatttggagggaattttatttcaaaatcactttgtaacttaaatttctccaaaaacattttaccctctaatgcccagtatgtttttaaaatggaatggccaatgtgcccaccaaacctcttccatggaaggttgatgagattactctgtaatctcatctggctaaacactcctcacacacacactattgggttgtcagatcaaatacaggccacccaatacaatttgaatttcagatcaacaacagacaacttttaatataaatattttttaaattgcatggggaatatttttactaaaaaattattcattgtttatctgaaactcaaatttaactggcatcttgtatttttatttgctaaatctgacaactttacccaaagaaaacatctgaatctctgacagtcctcagcatcactcaccaccctcaccatcttcattccattcctaatttaagcctagtcttcaaagttaaattggaatataaattaatactaacaaacaaaatttggtattacagaggattggcattaaagagaattaaaaaatacagttgccactggcctgaaaaatagggaattaaaacaacttttaagaaatttaagtacgcaaactagatcataaacatgctcattttcaaaaacttctgccataattaatgtgtaaaactttatacaattgaaacctagaatgttttaagtgctcaagccagaagacgataaagtatcttctaaattcttgaaatcagtcaataaatactatggtcacattttattctgatatttgtactaatttgatgtgatttcttaaaatcacctaattcattctctctctctctctttctctctctccctctagttacctaaacaagaataaatacctgacagttattgacaaagatgcatttggaggagtatacagtggaccaagcttgctgtgagtaagacatacgaaagaatattttagtctttttttctttcttttttttttttttacttttttggaataaatggagacattaaggggagaatcttatgttcaagggtagaaaatgttgctgtctcgggtaaaggcttctgcaagtccctcttttcctggctgtataggctacctcttggaagaaagtccttgtcctttgagactcagaaggccccaagctccagtatgccatcatgatgcctgctaaggcagccaccttggtgtacatgctcacagaggctctgttcatggagcagctgctgtttgaaaaattttgaaatgcaaggtccacaactagatggaaggcactctagtctttgcagaaaaaaaatgtacctgaatgtacattgcacaatgcctggcacaaagaaggaagaatataaatgatagttcgactcatctgtggaagaacttacaatcatggggaaagatggaataaaaacattttttaaacagcatgagaacatacctatttgtgcatttcctttgatttacacccccacatccaatcagtgatcaggttctattgattctgcttccctgaagcctccgtatcattgccaccttcctcattcccttggttttgcctcagtttagaatctcgtcattgagcatccactctagtccttgccaaagtggatcacaggccgggcgcagtgtctcacgcctgtaatcccagcactttgggaggccgaggcgggcggatcacgaggtcaggagatcgagaccatcctggctaacatggtgaaaccctgtctccactaaaaatacaaaaaattagctgggcgtagtggcgggtgcctgtagtcccagctacttgggaggccgaggcaggagaatggcatgaacccaggaggaggagcttgcagtgagcccagatcgtgccactgcactccagcctggacgacagagcgagagtctgtctcaaaaaacaacaaaaacaaaaacaaaacaaaacaaaaaaacaaagtggaacacagcaccctagagatacacaagataatctgttaggggcaagaggaaatattagaggttctatttatacttatgtttaaataagaacaaattaagttttattaatcttttatttatagatagccactgtccctcaggtgtcaggtaggggtggatgcctcctagagaagggtgagtgatccacagtcctgagcactggataccttcactctttcacctttaacaatgttatttcactttcagattgaatgcacccagtgcgtttaaggtcctgttctcttaacacatacgctccatccaaataagaggtcagagtgatcttgaaaatctgctgtgccacgtgggggttcactgttaattcatggcaaagtacttaaaattattatgcatttttctttttacaagaagacaagtggggaaaaaatgtgttaaccttttctgtgataaagtccctgtcagtaatttttaacctggaagatatttttcaataacacttttatatctgcttcttcaagattaaggtactacttcgccaagtaataagaaaagtcattgctttttcaaagaaacgtatgctttagagaaaggctttagaaacaggtatttggaaatattcacatattatgcgattttcctgataaaaaattgtcaatgccataaaaattctgtttggttcaaatcagaaatagaattttaacttgtttttaaatctttcaaattaagtttgttatgaactaaattgtatctgtcttcctaaattcaaatgctgaagccttaacctctagcatcttagtatgtgactgtatttgaagatagggtctgtaaagaggtaattaaattaaaataaggctgttaggtgagccctaatccaatatgacaggtggcctcataagacaaggagattgggatacacagagagacaccagggatgggcgctcacagaggaaaggccacgtgaggccacagcaagaaggtggccatctgcaagccagggagagaggcctcaggagaagccaaacttgctgacactttgatcttggacttgcagcctccagaactgtaagaaaatacatttctgttgtttaaaccagccaatctgtggtattttgttaccatagctctagcaaagtaatacagagttgtagcaggtttaaaatccatgtgtataaaatgtgaaaatgaaacacctccagatcaccttgcaaaaacaactgattgacatcagaaaatataaaatttcattaaaagcatgtatttaattactgaattagattgaaaaatgagaatcttagtttaataaatgcagttaagcctgctctattcttggtgaaacacccatctttggtaattttttcaactaggacggccatttaaaccaaaatcaaaataaactgaaccaaaagcagactttgaacagccatagccaaaagggttaaaaataattttcaaaactaattaagcatatttgataacattgcttttgcttttatgaaactttaaaaaatatatattacttatcttcattgcattattttaaaatgtatgtttagtgtgttatggtatatattatatagtattacaaaaatacatgtatagggttcatgactgttcatatgttagtggtacatactcagatattttttacttattaatatgtgagattgaaagaatttgaagaccaatagtgtagaccagaaccactcaaagtgagttcattacaaggtaagtggctgtccaggatatacagcaaagcacagcttcttttttggagaaaatcttgtcatgaaaatgaagtcaaccaaactcaacagtgtgtttagttgaagtagctggcttacatccagcatatgcttcttatccttggaatggtaagaagctattggccaatgggcaccataggttgagtagcagtagtctagatgattagcgtctccaaatctggctcctgcctttatttagtcttggttcctctcaaatccaccctccccaaacctctttgggttcacatgcaaatagaatcttaaacccaatactggcctcccattcccctcaggatagaggtcttggtgtggcttgcaaggcattgccataatcttcagctttgtcttttacactactttacgcctctgatcaatggtccatccatatcgaacctcttagctcccttaattctccaacctacttacactgttatgctaaactcttactcttcctactgtctggaaaaccctgctataatcttgtctttctgatgagcacctgctggcattttaattctgccttagagggcagaattgtatttccacaattctggttcatattataatgcccaaaacacagtatgagcttaataaatatttgtgaaattaatatggtacccaataaataattaaagcactcttctgtaaacactatagcatttaaagagcaatcatattttaaagatattttagtctgttgtcctcaagggaatgtgtccatttctacttctttggaagtggtcaattaaactacctgcttgtactgcctcgaagttgttttttatatttatggcaagattttctacaagactctcccaccaagttaagaggatttgtgaaactgcctgaaaatgctttccctgcctcttggtggcattccaggttgtggaaagtgacaaagatgaggagttatacctggagttgactcccagccccatcacttactaactgtaagacccaagtctcagttttcacatctgtcaaaacaggataaagtaagctaataaagtttaaataagataataaaggaactaaatatatcctcaataatgttagacattattatgattattttcacttcttcctgaactttgacacttcattattctgatctgttgtaacctctctgatcactccttccccatttctctccttagctcactgcatcattcctcaaaatggggttccatcctgggtcctggctctttttcctctatatcttctcctttggttaaatcatctgctcacaagtatcatgagaatgtgaatgatttctaagtttagggcctcataccttagctcttatttggccattcacccagctgaaattcttttcttgctccctctcattcctatccaatcccatcaatctggttaaactctccctagccagcctttgaaaatgtacaataagcatttactgatgagaacttgctaagcttgggattcttcactgggaactaccagtaggggaaggtcactacattaaagaacagtgagtgaaaagcctcatcaagaaggtggcaattcagaaaatatctgaaagaaacaaaggggcaagcctggggacaatctgaagaaagagcattttagacaagtacaaagacccccaggtgagaatatacctggcacatttgaggaatagcaaggaggccattgctgctcaaacagagtgaagtaaacaggggggaaaagtaaaagctgtgatcaaaaagatgatagggttgaggagcaacttgcagatggtcttagaggccatcatcaggtcttttgatttgctctttagatagaggggaagccataggagcattttgagcataggtgtgtcacagtctgactcaaagtttcacaggaacatgccggctgttgtgttgaaaataaactgtagggaaccaagtatggaagcaagaagaccacttaggaatatgccaaaataatataggcatgagatgaaagtagtttgcactaagacagcagcagtagagatgatgagaaataatctgatcctgactatattttttaaggtaaagccaacaggacatgctgatggatcggatatagcagatgatgagagaaaggaaggaatcaaggagaactgtaattatttttgactgagcagttaggagaatgagatcactatttcctgagatagggaaagttagtttgaggtctcatgatgcatgcaagcaggcagtgatatatatgggttcaaaagtcacaataggggttagggctagagatatatttgagactctttggaatgtagctggtgatgaggggatacaggtatagaagaaatctcaaaaaatgaatagaattgagacttctgaactctccccaccaatgtgatttccctgatccttttttaaacaacattaaaatgacagtacttctgagaaaatataaatacattaaaaagcatgtatttttaatgacaaagagtaggaaaggtgatcatgtgagtaagtgacgagtgtcttcaaaaaccaagagagagctgcacgctaagtacttgcatgggtgaaatcaataaaatgcaagctaattcaaatcacaaaatctaggaaatattttatcaattaaatcttaagtgttctgcaaatgagaatataggtgacactgaagctggtcggtctcattctgcacagtcaagcactacttcttactcatcccagaaaaaagactagaatttgctttctgttaaaatgtcatcaccaagactcaaggagaataagcacagttggggttagaaggcaggtactgttctgaaaacaggattatatgaaaatttacattctaaaatgtaagaataacaatcctcttatccactcactcaactcatagaatattggcaaaatgtataccctccaagtaagagatgagagtactgaggaagctgacaggcccaaggaaaagaaaaaaaaaaaaaaacctacaaaaagaatcactgtgggggaggagccaagatggccaaataggaacagctccggtctacagctcccagggtgagcgatgcagaagacgggtgatttctgcatttccatctgaggtaccgggttcatctcactagggagtgccagacagtgggcgcaggtcagtgggtgtgtgcaccgtgcgcgagccgaagcagggcgaggcattgcctcactccggaagtgcaaggggtcagggagttccctttcctagtcaaagaaaggggtgacggaaggcacctggaaaatcgggtcgctcccacccgaatactgcgcttttccgatgggcttaaaaaacagcgcaccacgagattatatcctgcacctggctcggagggtcctacgcccacggagtcttgctgattgctagcacagcagtctgagatcaaactgcaaggcggcagcgaggctgggggaggggcgcccaccattgcacaggcgtgcttaggtaaacaaagcagcagggaagctcgaactgggtggagcccaccacagctcaaggaggcctgcctgcctctgtaggctccacctctgggggcagggcacagacaaacaaaaagacagcagtaacctctgcagacttaaatgtccctgtctgacagctttgaagagagcagtggttctcccagcacgcagctggagatctgagaacgggcagactgcctcctcaagtgggtccctgacccctgacccccgagcagcctaactgggaggcaccccccagcaggggcacactgacacctcacacggcagggtactccaacagacctgcagctgagggtcctgtcttttagaaggaaaactaacaaacagaaaggacatccacaccaaaaacccatctgtacatcaccatcatcaaagaccaaaagtagataaaaccacaaagatggggaaaaaacagaacagaaaaactggaaactctaaaaagcagagtgcctctcctcctccaaaggaacgcagttcctcaccagcaacggaacaaagctggacggagaatgactttgacgagctgagagaagaaggcttcagacgatcaaattactctgagctacgggaggacattcaaaccaaaggcaaagaagttgaaaactttgaaaaaaatttagaagaatgtataactagaataaccaatacagagaagtgcttaaaggagctgatggagctgaagaccaaggctcgagaaatacatgaagaatgcagaagcctcaggagccgatgcgatcaactggaagaaagggtatcagcaatggaagatgaaatgaatgaaatgaagtgagaagggaagtttagagaaaaaagaatagaaagaaatgagcaaagcctccaagaaatatgggactacgtgaaaagaccaaatctacgtctgattggtgtacctgaaagtgatggggagaatggaaccaagttggaaaacactctgcaggatattatccaggagaaattccccaatatagcaaggcaggccaccgttcagattcaggaaatacagagaacgccacaaagatactcctcgagaagagcaactccaagacacataattgtcagattcaccaaagttgaaatgaaggaaaaaatgtgaagggcagccagagagaaaggtcgggttaccctcaaagggaagcccatcagactaacagcggatctctcggcagaaaccctacaagccagaagagagtgggggccaatattcaacattcttaaagaaaagaattttcaacccagaatttcatatccagccaaactaagcttcataagtgaaggagaaataaaatgctttacagacaagcaaatgctgagagattttgtcaccaccagggctgccctaaaggaactcctgaaggaagcgctaaacatggaaaggaacaaccggtaccagctgctgcaaaatcatgccaaaatgtaaagaccatcgagactaggaagaaattgcatcaactaacgagcaaaataaccagctaacatcataatgacaggatcaaattcacacataacaatattaactttaaatgtaaatggactaaatgctccaagtaaaagacacagactggcaaattgaataaagagtcaagacccatcagtgtgctgtattcaggaaacccatctcatgtgcagagacacacataggctcaaaataaaaggatggaggaagatctaccaagcaaatggaaaacaaaaaaaggcaggggttgcaatcctagtctctgataaaacagactttaaaccaacaaagatcaaaagagacaaagaaggccattacataatggtaaagggatcaattcaacaagaagagctaactatcctaaatatatatgcacccaatacaggagcacccagattcataaagcaagtcctgagtgacctacaaagagacttagtctcccacacattaataatgggagactttaacaccccactgtcaacattagacagatcaaccagacagaaannnnnnnnnnnnnnnnnnnnnnnnnnnnnnnnnnnnnnnnnnnnnnnnnnnnnnnnnnnnnnnnnnnnnnnnnnnnnnnnnnnnnnnnnnnnnnnnnnnnnnnnnnnnnnnnnnnnnnnnnnnnnnnnnnnnnnnnnnnnnnnnnnnnnnnnnnnnnnnnnnnnnnnnnnnnnnnnnnnnnnnnnnnnnnnnnnnnnnnnnnnnnnnnnnnnnnnnnnnnnnnnnnnnnnnnnnnnnnnnnnnnnnnnnnnnnnnnnnnnnnnnnnnnnnnnnnnnnnnnnnnnnnnnnnnnnnnnnnnnnnnnnnnnnnnnnnnnnnnnnnnnnnnnnnnnnnnnnnnnnnnnnnnnnnnnnnnnnnnnnnnnnnnnnnnnnnnnnnnnnnnnnnnnnnnnnnnnnnnnnnnnnnnnnnnnnnnnnnnnnnnnnnnnnnnnnnnnnnnnnnnnnnnnnnnnnnnnnnnnnnnnnnnnnnnnnnnnnnnnnnnnnnnnnnnnnnnnnnnnnnnnnnnnnnnnnnnnnnnnnnnnnnnnnnnnnnnnnnnnnnnnnnnnnnnnnnnnnnnnnnnnnnnnnnnnnnnnnnnnnnnnnnnnnnnnnnnnnnnnnnnnnnnnnnnnnnnnnnnnnnnnnnnnnnnnnnnnnnnnnnnnnnnnnnnnnnnnnnnnnnnnnnnnnnnnnnnnnnnnnnnnnnnnnnnnnnnnnnnnnnnnnnnnnnnnnnnnnnnnnnnnnnnnnnnnnnnnnnnnnnnnnnnnnnnnnnnnnnnnnnnnnnnnnnnnnnnnnnnnnnnnnnnnnnnnnnnnnnnnnnnnnnnnnnnnnnnnnnnnnnnnnnnnnnnnnnnnnnnnnnnnnnnnnnnnnnnnnnnnnnnnnnnnnnnnnnnnnnnnnnnnnnnnnnnnnnnnnnnnnnnnnnnnnnnnnnnnnnnnnnnnnnnnnnnnnnnnnnnnnnnnnnnnnnnnnnnnnnnnnnnnnnnnnnnnnnnnnnnnnnnnnnnnnnnnnnnnnnnnnnnnnnnnnnnnnnnnnnnnnnnnnnnnnnnnnnnnnnnnnnnnnnnnnnnnnnnnnnnnnnnnnnnnnnnnnnnnnnnnnnnnnnnnnnnnnnnnnnnnnnnnnnnnnnnnnnnnnnnnnnnnnnnnnnnnnnnnnnnnnnnnnnnnnnnnnnnnnnnnnnnnnnnnnnnnnnnnnnnnnnnnnnnnnnnnnnnnnnnnnnnnnnnnnnnnnnnnnnnnnnnnnnnnnnnnnnnnnnnnnnnnnnnnnnnnnnnnnnnnnnnnnnnnnnnnnnnnnnnnnnnnnnnnnnnnnnnnnnnnnnnnnnnnnnnnnnnnnnnnnnnnnnnnnnnnnnnnnnnnnnnnnnnnnnnnnnnnnnnnnnnnnnnnnnnnnnnnnnnnnnnnnnnnnnnnaaccacaatgagataccatctcacaccagttagaatggcaatcattaaaaagtcaggaaacaacaggtgctggagaggatgtggagaaataggaacacttttacactgttggtgggactgtaaactagttcaaccattgtggaagtcagtgtggcgattcctcagggatctagaactagaaataccatttgacccagccatcccattactgggtatatacccaaaggactataaatcatgctgctatgaagacacatgcacacatatgtttattgcagcattattcacaatagcaaagacttggaaccaacccaaatgtccaacaaggatagactggattaagaaaatatggcacatatacaccatggaatactatgcagccataaaaaatgatgagttcatgtcccttgtagggacatggatgaaattggaaatcatcattctcagtaaactattgcaagaacaaaaaaccaaacactgcatattctcactcataggtgggaattgaacaatgagatcacatggacacaggaaggggaacatcacactctggggactgttgtggggtgggggcaggggggagggatagcattcggagatatacctaatgctagatgacgagttagtgggtgcagcgcaccagcatgacacatgtatacatatgcaactaagctgcacaatgtgcacatgtaccctaaaacttaaagtataataataaaaaaataaaaaaataaaaaagaatcactgatagtctcccaaagtcaccatagtaatgcccatcagccaataagcttccacacacagagcttcccataggcctcccttaccaacaagaacagacatccaagaaccagcagacctttgaggaaatccattgacatgaaaaatgtcaatgtcttagagttttcagtatacagatctttcacctccttggtttaaatttattcctattttttgttttgttttgatgccattataaatgggattgttttctttgtttctttttctgatagcttattgtttgtttatagaaacacaacggatttttgtaggttgactttgtatcctgtaactttactgaattcatttcttagttctaacaggtatttggtggaggctttccaattttctttataagataatgtcatccacactcagaaacagtttctcttctttctttaggatttggacaccttttatttgtattgcctaattgttctaactaggacttccagtactatgttgaatagatgtggtgacatgaaaaacaaggactagaataaacagaaaaaggaacttggaaggaacagaaacaatgcaagaaccagaagaaaactttcatgaaagttataacaaatatcctcagcgagacaatgttttacatgtgcaaaataattccttatacaggaatattcagaaaacaataaaagagcttttgaaaattaaaaacatgaaagccaaaaccaaaaaagtaagcagaagttgttaaagataaagggaaaaatggcactcagtagagacagcaaaaaaatatgaaatagaggaaagaaaacacatgaacattagaaattcaagccacgaggtccacaacccaactaacaaaagttttaggaagagaaaacaaaaactgaaaaagaaaatagtgtagcagatttcccattaataaagaaaatgaattttcagaataaaaagacccacagagaacccatatggcaaaaaaaagagtggggaggcatgaaggtacatcataaaacatgaaatcaatgggataaaaataataaattaaaggcgtctagacagagaaatcatgtggcctgtgcaggctggagaatcggaatgccatcagccttctcaatggcgacactgaagaagaccatagatagaatacaccttttgaattctgaagggaaagtcatttccaaactaccaatcaagtatgattgataaaataaagatattttctcacatgcaaaatctcaaaaccttgatttcctattcaccttttcttggagaataaaccaggaaagagaaaaatgaggactttgttaaaacagtgatcaacacaggaaagaagcaaatagaattcccaggatgaccacaaagggaggtctgaggagtcttgagaacatgatgtctacatcagagctgaagaatgaagactccaagaggaaggtcttctagaaataaaagagggttggctgggcacggtggctcatgcctgtaatcccagcactctggaagacagaggcaggcggatcacttgaggtcgggagtttgagatcagcttagccaacatggtgaaactccatctctactaaaaatacaaaaattagccaggcatgttggtgcataattgtagtcccagctacttgggaggctgagttaggagaatcgcttgaacccaggaggcggaggctgcaagtgagccgagattgcaccactgcactccagcctgggagacagagcaagactctgtctcaaaaaannnnnnnnnnnnnnnnnnnnnnnnnnnnnnnnnnnnnnnnnnnnnnnnnnnnnnnnnnnnnnnnnnnnnnnnnnnnnnnnnnnnnnnnnnnnnnnnnnnnnnnnnnnnnnnnnnnnnnnnnnnnnnnnnnnnnnnnnnnnnnnnnnnnnnnnnnnnnnnnnnnnnnnnnnnnnnnnnnnnnnnnnnnnnnnnnnnnnnnnnnnnnnnnnnnnnnnnnnnnnnnnnnnnnnnnnnnnnnnnnnnnnnnnnnnnnnnnnnnnnnnnnnnnnnnnnnnnnnnnnnnnnnnnnnnnnnnnnnnnnnnnnnnnnnnnnnnnnnnnnnnnnnnnnnnnnnnnnnnnnnnnnnnnnnnnnnnnnnnnnnnnnnnnnnnnnnnnnnnntgcctcaacctcccaaatagctggaattacaggtgccaacaccatacctggctaatttttgtatttttagtagagatggggtttcaccatgttggccaggctggtctcgaactcttgacctcaggcgatccacctgcctaggcctaccaaagttctgggattataggtgtgagccaccgctcctggccttgggaggtgttttaaagaacattggagcatgtagaaaacttagcaagaggtttgttcaaacaaagacacccaaataaaaagagagagacagatggacatcttatgaaaaaaaaagcaaacagttacatgacaaaggaaatatgcaaagttgcaataaccacagtactgaatatgggtttaaccaaatatgtcacaaaactatttcaggagagtagaggagtgtgtcaggagaggaaatgtgtaggggtgagggatgataaaagaaagccaaatcctcatcttctatagtagagagtcagcggataaaatctaaaaacaatacatcaagaaatacttacacttatggaaggaaataccagaagttaaaaggggttacttctgggacatcagacaccagactgcagagaagggctgcctcttgtattaacaagcttccagtataatttgctttttaaaaataggtccatgcattattttaataaaaattaggctgggcgtggtggctcaggcctgtaatcccagcactttgggaggctgagggggtgtggatcacttgaggtcaggagttcaagaccagcctggcctacatggtgaaacgccgtctctactgaaaaatacaaaaattagctaggcgcggtggcaggcgcctgtaatcccagctactcgggaggttgaggcacgagactcgcttgaacctgggaggcagaggttgcagtgagccaagattgcaccattgtactgtagcctgggagacagagcaagactccgtctaagaaaaaaaaaaaattaacacttaatttaataacaaagccacaaagcataggaagagaagacaatggagatgtcagcatgtgagaggtcaataggagaaaagtaagaaatgaacaaagaagagtccagtctcattcctgaacttccaagcatagttgttgtctgaaaatgaatttgttaactaatcatacatagacgtgtgacgtctctttaattcttgtcttgatcttttgtcaaaatctccattattttttcccacatagcttctttccataattagattttaagatcccagaggaaataagtggtgtcttatactttttataaccttcctgcctcaaaacagaagacagaaagtgctcaataaatatcggatgaattgtaactaaatatcaaatagccatgatttcattgtcatttgttgtcaaagccaaacttcgaaaatcgtaaactccatctaaagaaaagagaatcagatgccatatatatttctgccttataaaggtttttgagggacaatacagtcatgtctaatagtcaacaacaacaaaaaaatcaaacttacccacttaatcatcgtttttcaaggtcacttctcaaaagataatctaatttaaagcaggtgcaatatctagagtcagaggatctattatccaatatttgctgtttttcaaaaagacataaatttagtttggaagtataataaggttttttattgattgatttttaatcaagatatgcaatctcattttccatttttatactttccatttttgattaccttgttttctttttatcttattttgaaagagaagtgcttggtgttttaaatctcagaggaaagaacacactgaaatgcaatgcctttcataataatcagagttctctaaattctaaattatgtaacccactttaatatagcatttagcatattgttgagtaagtacctcctaagaagaggaaatctctgtaataatatccttgagtttgcattacaggtatcagcataaataaacttcaaaaacacacttttcttgtttttagctgatcaaattaattcaagggtcatggcactgtcatatttctttggtttcttttttttctttttctttctttttttttttaaactcttcatgatcttcacaagataatactattaggtggctgaaaatttgtggcagagtccttaccggcatgcctgaaagacacaggtgaatacacgattttctaggatgatcctgagcaaacttatattttaaatataatttgcatacaataacatacacaattttttaagtgtacaggttgatgcgattcaacaaaactatattactctagcctgattaagacttggaacattttcatcatccagaaagttccctcatgcctcaccccacctcccatagacatgctatttttctaatataaaaatttagtagtaaaattaacaggtaataggatagatgtatatctctatatacatgtctttatgtatactttataggaaatactgctacgctgttttccaaaagggttgtctcattttctattctcaccagcaaggtatgagcattttatactggccaatgcttttaattgtcttttttttttttattctagccattttaatgggtgtctcattgtggttttaatttgtgtttccctgattattaatgatgttgagcatctttttatgcacttgtcagctatttgtatattttcttttacccagtttctgttcaaattttttgcccattttcattggatttttgtctttttattattcaattgtgttccaggataaaatttttgacctaaataaaattttggtcctggccaccagctctctgccaaccctagtgcaaatggtccatttactcacttattccacaggcattttactaagcacctactgagctccagtagttataaggataagacacagcctctgctttaaaaaggttacaatcaaatttaggagaaatgtgaataagtaactgtaacataagtttaatgtaaaaagccataggagatatttagagactgaacatgacatttctagttagggtgatcagcgaaagctttattaaaggagatagtatttgagatgggcttcaggtgaggggcagaattgcaacagacagtgatagagttatgagagaaaacaaaggcacgtctataggaaaacatgggatgtgttcagaggaaaaaaaatgacataattcaggcaaaaggatagtgttgggatgttgtgttgaaatcatactatggacaacctaatctgacgcagcaggtaaagatggcccctgtggaagtagtagtaatagttgcataacagattaaagtttgtggccctcaactcacctcagccctgactatattattgctgatacctctgtcacagccactgagctgggactgctaatctgcacctcctggcaatttgacagggactggatctccctctgaggggagggaaattgagccccaaatacctcatcagcctggagctccttgactttctttctgtgcttaccaagtgaagctcttggtacagctcccttggagaagggaacctcctgcagatgcaaagccaggggaggcttgcatgctaggctgccctgctcaccgaccgtgaaatgagttgcaaacacaagacaaagacaaactgccgtcttgcacacctagcttgggcaccaagccagacctatgccaaaggagccgagttgttggggaagcaactgaagtaggtcatccctcctaagtcacacgctcacatctccagaggcacagcaaagggtctgcaaggaagatcatgaaagaatttgaagagagagagagtaggaaatgatctttccagaatggtgtgcatgctgacttcttgacaagaacagggaatggtctgcttcagccctaggaattttctgaacagaagagtcaattgacaactcaggatacttggtttccctcaaaatcctaatttattgatcggtagcatctcctactaccatagccactattatgagaaaaaagaattaatacattaaatcacagcaatctatattggcaaggtactttcataactattgagaaattgtttgcagagcagtccccaactagttggctgcctgctggtgggagagggataaagcagttagtgcaaagatcctcaaaatcatacaaacctttgtacttcttcaactgactaacagtgcaactactatcatccccgaaagatttttagtttaaataacagttctccaaaacaccgggagccactgtctagaacaatggcctcaaatggtcatgcattttatattaggggattcagtctgaataaatgtttcctaactatgccaggacaaaaagtaaactagaagagcttttcttctctaaaaataatttgcaaattcataaaatatttctttagcatggttttgctaaacttatttatttaagtaagggctttttaccttgacaaaaactggtagaacataaaagaatttttgctgagaatgaatactaggaaaacaacactgccaaaatgttctaaaccttataaattctgaaccattttattaactaattatccctctttagccaggagctcgttaacagtaaagaatctgaagtttgttctatgttgagcaagtaggacgataattacttcttcaatgttccttctttgcaattttatgtataaataactctaccttttagtgagtgcccattaggctctgtgctattttttacataaatttgatttcagccttccaaccccaaaagattctgacttctccacacactcttctcagttttgggtgattttgcccatttcaagtctcaattatctgtataatgaaagaagagaaacaagattgcataggaccaaatagtaaaggcaaaagccatgtatactatgttctatagcagattttacttgtgattttacaattaattggaggatgctggcaacaggctaaataatgacaggtataaatcaaccttggattaaatttttgaataaataacagaaacacaaaaagcagtttttagcatgtagaattaggcacacagttcttcccaagtaaatgtggatgggtactaaatgttttcacttttctgggagtttactcctagatcaggtgggaggaaataatcaagcattgtcatctgacacactatctctgccaggacatggaaatctattttgttaattacattctgcctctgagtctaaaagaaataaacgctttaaaaaaaagtggaccttttatctcccacaagcagcattgagcctgacccttttgccagtacgatgatgatcattttgggtgtgtgtaggggttgtgaggttgagaagggaggggattcaacattgaggaggaggctatgcttgtgtttcagcttcagactattggcagttgatatggtttggctgtgtccgcacccaaatctcatcttgaattgttgctcccacaattcccacatgttgtgggagggacccagtgggagataattgaatcatggaggtggttcccctatactgttctcgtggtagtgaataagtctcacaaaatctgatagttttataaggggttccccctttcacttggctctcattccctctcttgcctgctgccatgtaagacgtgccttttgccttttgccgtccaccatgattgtgaggtgggaggcaacgtggaactgtgagtccacattggggaactgtgttccccagccacgtggaactgtgagtccattaagcctttttctttataaattacccagtctctggtatgtctttatcagcagtgtgaaaatggactaaaaattgccctggtttccttttgtcactgtgtggtagaatgttgactcaccaacttacaggatacggcaattttccattgcagaatccattatgttgcaatagtaaacgctgaaagatttcatagatcatggaaagtataggcttataagaaatgattgtagtaatatctgagttataaagcaattttatttgtacacatagactttaagaaaagattcataatttctgatcaattttctgaatagtcagacacaaattttcttattaataacaagtcatttttgagcattagctttgtgctgggttctttacagatagtctatcactttgggcctaactattcaatagaaagtattcttattcctatttaacaaataaggaaactggtgcagagatatcaggtaagtcccccgaggtcacctggccataagggaaatactaggatagaaattcagtattaactaactccaaaacacgatctcttcctggtgcatcaggtcaaccccttttatgtaagattattcttgcacctgttgtaattctgcaactttacttgatcatattcttaaatttctgcttaaaagcctccagtggtggtttaccatcttcatttttaaagagacaaagtcctcacaaatagccttcaaagacctatgctgtttgtctcccacccatgccacgtattctctcatcctacctcctatttctttcctcctcatggttctaccccagccacactgaataggacacatggcatgttcccaccttaggggttgggcactagttgttttctctgccagagagccctctccccagatatccatagctgtctccttcgtctgatacaagtctttgcttaagggtaagtttctcattgagatcttccctgaatgccctatttaagtttgcaaactgcccaccactcttcatcccactttcctgttttatttttccccatgatgcttattaccatctgacattctagacatttgcctacagtggtaccccctttactcatggaggatatgctccgagacccacaggggatgactgaaacagaggagagtccctaaccctatatataacatttttttcctccaacactgctcctgtcctaactttggttatttcaatatccacatggattatctttcctataccttgacctctgagctccactcccccaataagcctgcccttcattgtacttccaggcttcactagacctgtcatgaccaatgactacaaagcctccataaccttaatcttaaacatcctgctctctttctatctctttccttagaatacgttaatccttcaattttttggttctgccaggatctagtctgttactaacgtttcactgtctctcacctccctcatatcctcactctttccttatgcagcttaaatgccatgttctgtcattataaacactgacttgtatatgcagccaactaactaccttgcctctctgtctcatcagcctcttctggccaagcccaaccctggttaggtctaaccacccacctgcttcaggcctgggcttttgcagctgaacatagcaagtggtttcaccttaaatcattcaccccaagcaggctctacctgctgcacagcaatcacatcccacttccccattccctctcccattctgttggatgaccatgtcctatggcctcccctctcttcagttctctagtcctctccctcattctcatgtccacttgatcaccttgatttccatttcactgagcataaaatcaatccaaagagaactcctcatgtcccactaacacatctacccatcttcctgtgtctatgcccacatcctttctcctctcttccgtattttaagtcattttttaaggctggccccttcaccggggccctagatcccatcccctctcaaaaactcaaggacgtcgcttcagcaatcctctcccttcttccctaatcatctgtattcccctccctactaagttatctcccatcagtgtataaacatgctgtagtttcttccatcttaaaacaatgtttcgtgaatatggattaaaagacgcctaagagacatcaattgaatgccatgtctgggtctatttggatctgacttaaacaaggtaagaactaccttgcctttcttggaaaactgatgattgaatattacatggccttaaagagttattgttttagatgttatttatttttaaaagattccttaattcttagaaaatattgaaatatttataattttaaaatatcccttccttcatatctacttccacctactgccctatttatctgtgtctttttgcagcaactatcccaatttctgttatgctcactccaatcaggttttcacttcccaccatgccactaaaactccctttacacggtcaacagtgacttccacagttgctaaatcaagtggccaattgaatccaccnnnnnnnnnnnnnnnnnnnnnnnnnnnnnnnnnnnnnnnnnnnnnnnnnnnnnnnnnnnnnnnnnnnnnnnnnnnnnnnnnnnnnnnnnnnnnnnnnnnnnnnnnnnnnnnnnnnnnnnnnnnnnnnnnnnnnnnnnnnnnnnnnnnnnnnnnnnnnnnnnnnnnnnnnnnnnnnnnnnnnnnnnnnnnnnnnnnnnnnnnnnnnnnnnnnnnnnnnnnnnnnnnnnnnnnnnnnnnnnnnnnnnnnnnnnnnnnnnnnnnnnnnnnnnnnnnnnnnnnnnnnnnnnnnnnnnnnnnnnnnnnnnnnnnnnnnnnnnnnnnnnnnnnnnnnnntttcatttcaccttcccgttggtgaatgcttattccagcttgtagggatttaacttaatgcctatgatacccaaatagaaaatctccagtccagacaattctcccaaattccacgcttataaaacactgcttgactgccgtcaccatctggatgtccaataggcatctcaaacttgacatgcccgaaagtgaacttctgatcattccctccaaacctgcctcacctgcagccttccccatctcaggaaatggcaacttcattctcccagctgcagactagaaatcttggagtcattctcaacccttccctttctcacataccccatatcccatccatcagaaagtcccaacggctctacttttcaaatatctacaaactccaaccattttcggtatctccactgctaccaccctagtccaaagcaccatcctctctatttttggtctccctgtttccaccccttactcactttggtaactttcaaagcagcagccagcatgatcctttttaaataagtcagattataccattcctctgcagccttttgatctcacttccatgaaaatgtaatgttctttcgacagcctacaaggccacacatgatctggctcccaatacctccgctgacttctcccacatgttctatgccctcaccgtctcagcaccagcaacactggcctccttgcttcctcaaatataccaggtgcactcctcacagtttttacactgctggtcccttggcctgcaatgcttttgctccagatatcagcttggctgtctccctcacctccttcagacacctcctcaactatctcctcaatgaggccttccctgacactgtcccctcatctctcattgtgacccactcctggtctctgccttttctcttccctgttctccttttccccatagtacttatcattatcatctaacatactgtatgtcttcacttttttaagaaaaaattacctttttctccactagaatataagcatgaggagagcaggaatttctgcctgtttagtttactactatagccctagcttctagaactatacttgagacatagacagcaatcaatacattctgtacttgctaaataaatgcatattgcatttctaaattatttaaacatattaatagacaagctcactgtcttgaattcataccttttaaacctttaacttatttttcaattcaatattaataaattaattatattctattttaaacggtaaattaatctttctgctcttagatgcatttcatttaccaatttacagatgtaactgcacatttataatggagcagcttccacatattgacctttgggaaaacctactttcatgacaagcaaacagaaaagacacttgcaattgctgttggaacactggcaagccaattagtgcttctttaatttgcaactgaatttatcataaattaatcttaaataataatcaatgacaaaatatgtctcaaaaaataaaaatagttccaatgtttggggatactagagggcataattgcttttgaggtgcaatttgctcttcctatgacattaaacgtagttagctcttttttttcctggcatcattaaaatctcatgatattcttctctgtatataacactgcaggactcactctccccaaattcaggtcctgttactttcattagacacttaactcgagattattcccacgacctaggcaattagacttcaaaccatctgccagactcagctcagctgcattctgatttgtgagtaaatacttgctagagacaaattctcatggagttcaatgcccattgcttgatgagctctttgaagagagtgccagagtcaacaaaacagagggaagccctccagcttgtagctttctatccatatggctacatccacaagtgatttcagatcccttcatcacccataacaactctttatattcttcttactcagaaaaaaaaaattactacatgttgacaggtttattttaggaaagaaggtacacactatttaaaaatcctggatttgaagtaaccaaataaagctttgggtgagtgggaaaaaatacatcctcaaataacttaaaatgattcctgacttattgagtttgaggatctcttcagactgagatttattctccgacaactccagaattgggagactatcaaatgtggctcagtactcaacaagtatttgttccaagctcttgcacagttctgtgtgctaaatacagtagtgattaaaagttaaagatgaagcattaaacctaagattttattttctctccctcctgagatccccttaaaaagatgagaaaggagtttttcctatttatacatccacaagaatttttactatgcatacattcacagaagacaggtcagagcccatccatggtctgaagagctacagaattcagaatgaagaaaaatagaaaagaaggaaggcaaaactcacagtactcagagggagcgtagtcagagactgctgccttgctctgtaaaatctctgggaggaataggacttagaggtgatgggtatggcatgtggtaagagtaagacatgggactgaaaacagaagggttaactgaaagtttatatctggaagcattaatcctgtactctatttatgcaaaattccaacagccaagtacctccctactaagctgaagaggttgagaaatcctaaaacaaaaaagacattcacattctggcactttagggtctaccaacataatggccagctccctacacaattaccctaaagcaaagtctgccaacagaaaagcaccctcttaaatatgaatgtgtgcaaccagagatctccagtcaaagaaagctcctaacatggaagatcaaaaccaagatacacaaatggcggggaaatgagcctggagaaatcaaagacatcacagaaaagagaaaggaacctttaacaaagcaataattaaggacctgagataaatctgagaacacattttatccctattactataacaatcatgataataataataaaaataagagctaatatttattgagaacacactaagagctactgttcaacaaactcaagacaaggaaactgcagcacacaaagtttaagtgactgatagtaagcacagaagccaggatttaagtccagatagtgtgaatttaaaacccatgttcctaaacaaaggggtatgcttcctcaaatatgctggttttattttattttttattatttatttttttttatttttagaaggagtttcgctcttgttgcccaggctggagtgcaatggcgcaatctcggctcaccacgacctccacttcccaggttcaagcgattttctcctgcctcagcctcccgagtagctgggattacaggcatgtgccaccatgcccggctaattttgaatttttagtagatactggtttctccatgttagtcaggctggtctcaaactcccaacctcaggtgatccacccgcctcggcctcccaaagtgctgcgattacagatgtgagccaccgcacccaaccaaatacgctgtttttaaaaggaacagaacacaggaaagtgctcttaaaaaatctattcaggtatttgacaagtatgtgtttagagtcttctgttggctaaacaccagtctaggtaccaaaaatacggcaataaacagaacaggcagtatttcagctctcatgaagctaaaattaaaaatttagtagaagagatggaagatgcactcaaggaattttaccaggcaatttaataaaagtaataggagaaaattccaagaaaaaatggagatatgtctgatggaccaggaggtgccttttcctcttattaagaattccagagacaaaacagataaaatgagaataagttatcccataaacaatacaagaaaatttcctagcggtgaagaacaaaggtcttcagattgaaggggcctgtcttcccccagtgcccattataataaatggaaaaagattcctatcaaggtacaccttcatgaaatgtcacaccagggataaagagaaggtctgagaagcttccagaagtaataacaagtcaatgaccaaagaataagaatttgaatggggtcatacttaccaaaagcatcactgcgtgctagaatatgataaagcctttaaaattctgaagaaaggcgatttgcaactttaaattttatagccagctaaagtaccaattgaatataagggtagaaaaaaataaggtcattttcagacatgcaaagactcagaaaatatctccttcacacggcctaagaaattacttgaaaatgtgctctaggagagaaaatcaagaaaaaaggtgacacaagattcagaaagagactcccactggggagaggggaaatagtctcctaagaagcttgaacttcattctgtagctattagaggaggcatggatttcaagctggaaagcaatataagatctgtgttttagaaaggacattctttcctaagtctttcctaatgtcctttagaaaaaacattctttcctaagttcctaaaatcagaatagtggaagatttctgagaccagtcacaaagtttttgcaaaactcaggtgaaatgcagttcagacctaaactaaggtggtagcaatgagaaccatgaaattgtagatgtgcaacagctgggctcacatctgatcggggtggggggttcttagcacaatttcatgttgttgtaaatattcacggcatgaacatagggcaagggcaagagagactccacaaggacatcgaagcttcaagccctggaaagtggtagatggaagacaagaaataaagacattccagtaagcttcaaggcaagaatcattctatttgagatattttgagtggagaggcagttgctagatccataaagaagtacagaggagctcctacctttctgtctgatagcaaccagactgtctgattaaaactgcagatcactgcaagggtggttaaatcaaaaaagaaaaaaggcagttgttccccctgcttgaccctgaaagtgcagagatagtgtgggtggagtgcacaggaacacttaaggtgcagcatgcctaatggatacttagaacgatgacaagtgaggactaagatgtcttcaagtataatagattctaattttgtctgtaagtggccttagagctctgagatgagactacagaggtagtccagtgctagatctgcaagaccttaaagggcatggtaggaagcgtggatgttattcacggtacgttgagaagtcactgtaggcctttaggcaggaaagtgacattactcaattcatatgttatgattactctggctactatgtgaggaatggattgaaaaagaataaaagtggacaggaaagatatttcagtaagagataatgttagcttggactagaaagcttacactggagatgcaaatacatggatttgagattcctttggagttcagaatcataggtgttttgcaagattaaatgtggatgggacaatggtcttgaggaaatccaacatgttgtagtgattccaaggttactaatttgagcaatcaagtggatgagagtgtcaattaccatgttggggggaaatagaggaggagcaggttgagctaagggcaaaggatgaaaagataagttttgaaaggccctattaagttggagatgcctgtgaggcatccaggtggagatatcaaataagcagttggatatacaagttgaggtctggactggagctgtatttgccaacttcattgcttttggcttcagctcagataaacttcaaattgggacaaggaggaaattaacaattattgagcacctaccatatgccaagcacccacatttcccaacatctactttctccttgcctgcccaagcacccttccagttcagcccgagtgggacctaacttagaggccacctgggatacgtcattacatatactcagacaaactttggaatcaaatcttccctcccagattcctaatgagtccatggagagttactgcacctggatctgtgttcaaagactccaaagacctgaaagtgaagactagctcctgggacactgaagctgagaactccagacccaaatgatacttatgactccacccttggttcactgtatctttttggacacaacatcccttatttctttgtctgaattttagtatctgcccgcttcataaaaatgctttgagaattgaaaccagcttctgaatcacctggagagcatcctaaataatgcagattcccaggctccacaaacagagattataattcatttggtctggaatgtgtctcaatctgtattacaggtgattctgatgctggtccagagtgatccctggactagaaatgctgatttgcagagtgataaactgccagtttttccccaaattatctgcctcaatgctgtctccatcacttagaacattagggcagttttaaaagaaggcaccgaattctttgacactcttcccattaagaggtggactgtatgtcctctgcccttgaatttgatagttctcttagaatctggctgacataatgtgggaaggtcaagccacatggagtagccacagcaacagtcccagctgagctcagtctttgagtcacctcagccctggcaccagacatgccagtgaaggaaattgcagataatcccaacccccaggcattgagtcatcccagactccagatcttcccagctgacgccccagacatcacagaacagagacaacctatccccaccattccctgttcaaattaatgatccataaaacctatgctcataataaaaagattgttgctgtatgccacttagttttggggtgttttgtcacgcagtaactgaaataattactaacatgttttctcaagaaatatgtattaaaatgcaagcacattacttggatgaactctttcagatgaacacacacaatcagtgtatctagcagacaacaaagcagggaaatgagccatgagatgctctcccgtttcactgacgtgaaagcatcgctgggaaaggcaacctaagatgcttccagaaagctggaattgaaagatggccacaccttgaagacagcatggctaaaagagaaagacatgcctcaaaaaggacggatgaggccagagagcaaacccagattcattttcttcacaactgtgcttaagtctggctcaaaagtccctccactctctcactaaccacaaaggtgtttatttatgccagtttataaatgtctaatgttaaaaatcacctgggaataatacaggaacaagcgccaagggtaattttttttttttttttttgagacagagtctcactttgtcacccaggctggagtacaatggcgtggtctcagctcactgcaacttccgcctcccgggttgaagtgattctcccgcctcagcctcctgagtagctgggactacaggcacgtgccaccatacccggctaatttttgtatttttagtagagatggggtttcactatgttggccatgctggtcttgaactcctgacctcgtgatccgcccgcctcagcctaccaaagtgctgggattacaggcgtgagctaccgcacccagcagcaccaagggtaattcttaccagcaggccagtttggaaaatgctagattatatatttttttaattaaatacaaaacaaaatagcaaccgcaccaaccctttcctcacaagagtcacagtcctgtggtgagaatggggttaatacatgagctttacgttctgacggccttgaaccttgagaatgtaaaccccagctaagtccaattacaatgatgtggggggaggaaatggaaaataatggaattcactagctaattggatactattaattatattaaatattttaaatggaattatcttctatgaggaatattttaattgacaaaatataaaataggagggatattaggttaaatattcatggccttattcaagctattaatggtgccaataaaaatgatggagcaagacatggaacctggactccctgggattcagaaaagagcagagaatgccacactaatgccacgaattcattctattttagtaactaacactgatgtctacactgttcccagcctgaccaccacccccctcaccccattgttctcggaagtgatttgaatctgatttcacattgttaatatcaacacttgagttttctttccaagaaccgatttacagtcttctaaagacactggagtggcgggggagggggggaaatgttgtcagtcatgaattcccaatgtaactggttatgactctgaggtctgcatcattatcagattttcatgatactgatgttgattcatatcagtgagcagtttatcagtccccaaactctagtccccacagcagctgatagcaaggtaggccccttcgtctctattctactttatttctcttgcctcttgagaccctttcatagtcacatggtggcatgttgcagagtaaaattgacatctctctctgattccaagagtttgcatgtattgtgatggatagactaaaatgactgtggaaatagcatttgtagtactggatactggaattccaaggagttcctgtaacacagacttagaagcctaatatccatccctccttagaccagaagctcagcttatgtactcagtagaagaaaggagcatatcatctcccaattaacctcaggcctgtttgagtttctggccaaggctgagaaggccctggctgctcactgcctctctgcatttttctgttctctgcctcccagggacgtgtctcaaaccagtgtcactgcccttccatccaaaggcctggagcacctgaaggaactgatagcaagaaacacctggactcttaagaaacttccactttccttgagtttccttcacctcacacgggctgacctttcttacccaagccactgctgtgcttttaagaatcagaagaaaatcagagggtaagtggcagggacccggcataagtgacaaaagaccttggtggaagtggaattcatttcttggttttggggaagatgcttcctggtttgaaaaccaggtggagaggaaattggaagcatccatatgaaacaggaaatccatgggacacagtgaccctgaggacccaaagtgggtgcagctgagaaataaggcaaatgttgctggatagctgtagagcagaggaggtgacagatggcacaggagagagaaacacaaccagatctcatagaatcttgtagaggttatgtagacatgatgtccggtttccaggtacaattcagaattagatactgcaacacatatcagaccccagacaccacaaccatgagaacagacttataaacaacacaaacagttgggttacctgactggtttgggccttgcaagtgtcatagctccctggttacatgcctgcaggctttggagtcagctgggtttataccgcagctctgccatttttcaagctgtgttatcccagcctagttacttaaccactctgagtccttgggagtggagatcctaatactatcattcatagcagttttgagaagattaaatgagaaactgaatggaaaacactggaatggaatggcctggaatattataagatcttcattaatattaactatgatatacagtatgtgcacatcaggctgcttatgagcctgcgaaggaggaattgccttcattttctctccaggctttctctgattcttttacttttttgcttttactctgcattatttcccccattgtgtcttgtacaatctcctgttctcctaatccaccttcatcatctctattcagtcctcctcagcttctatgtatttactgattgacttactacacacataattgcagtcaggaaaatatcagatctaggtgtgagggcagaagctaaaacagccatacaaagaaggccaatatggtggccgggcacggtggctcacgcctgtaatcccagcactttgggaggctgaggcagccagatcatctgaggtcaggagttcgagaccggccaggccaacatggtgaaaccccgtctctactaaaaatacaaaaaaacaaaattagccggatgtggtggtgggttcctgtaatcccagctactggggaggctgaggcagaagaattgcttgaacccggtaggcggaggttgcagtgagctgagatcatgccagtgcactccagcctgggcaacaaagcaagattctgagattccatcacacacacacacacacgcatgcgcacacacacaaagaaggccaatatgggcatcatagctgcaaaaagccagcagtagggtagaggatggtgatagtggactctacactgatgccatgcagcattgagaaggactggacaagggctgggtgggaggcttaagtggacctcaggggcagggtctagacttcttagcctccagttgagaagagcaagtccattggacattttaaccagaacccaagagatcactcaaaatctgctcagcagctgaggcaagttaaagaatcccttttgttgtgagtctggtgagcaaggaaaaaactaaatcttatttccacaagcatgcctgtatggtagtgtccatttgttcatttgttaaacagatatttactgagcaccttctatgtgcctggctgttgtaaatagaacagacaagaattccctcttgtattttgcttactgtctaatggaggaagtcagaaaataaacaggctggccgggggcagtggctcacttctgtaatcctagcactttgggaggccgaggtgggcggatcacttgaggtcaggagttcaagcctcgcctggccaacatggtgaaaccctgtatctactaaaaatacataaattttttatttttaaaatattcagtttgaaactaaataatgatgagtagaggcagccatgggtttttcaggcaatgggaacatagggttttagagctttgaataggaataataataacaataaccaccatatggcactcacaaagctacaggtgctattgtaagagccttaaaaagataaattcattgaatcctttaataaccctatatgaaatagtcactcccattgtcccatgttacaaatgagttaaccaaacttcatgggcctacccaagctagtcaataatagagccaggttcccaccaaggcgactggctccagcatccacatttttttttttaaacagagtctcactctgtcgccactcagcctggaatgcagtggtgcaatcttgactcactgcaacctccacctcccaggtttaagcaattctcctgcctcagcctcccaagtagctggaattacaggcacgtgccactacgcccggctaatttttgtattttcagtagagatggggtttcaccatgttggccaggctggttcgagctcctgacctcaagtgatttgcctgcctcggcctcccaaagtgctgggattgagtcaccgcaggtgtgagcttttttttttttaatcactgttcttgaagtggttgcagaagagaaataagaccaatgccactggagcacagtaggggaggggaggtcataggaatgatgtcacagaaacaggcctgcctggatcctgtagaaccttatagaattatgtacatcacagtaagtagtttgcgcattttcgtaaatgtgggaaccattcgtgggttttaagcaaccattcttttttttttttttttttttttttttaagacagggtctcactctgtcatccaggctagagtatagtggcctgatctcgcctcactgcagctttgacctccccaggctcaggtgattttcccacctcagcctcccgagtagctacgaccacaggcacataccaccatgcccagccaatgtttgcattttttatagagatgggatttcaccatgttgcccaggctggtctcaaactcctaggctcaagcaatccacctgccttggcctcccaaagtgctgggattacagttatgagccaccgcgcccagcctggcactgactcttttctgttgccttgcagaatccttgagtccttgatgtgtaatgagagcagtatgcagagcttgcgccagagaaaatctgtgaatgccttgaatagccccctccaccaggaatatgaagagaatctgggtgacagcattgttgggtacaaggaaaagtccaagttccaggatactcgtaacaacgctcattattacatcttctttgaagaacaagaggatgagatcattggttttggccaagagctcaaaaacccccatgaagagactctacaagcttttgacagccattatgactacaccgtgtgtggggacagtgaagacatggtgtgtacccccaagtccgatgagttcaacccgtgtgaagacataatgggctacaagttcctgagaattgtggtgtggttcgttagtctgctggctctcctgggcaatgtctttgtcctgcttattctcctcaccagccactacaaactgaatgtcccccgctttctcatgtgcaacctggcctttgcggatttctgcatggggatgtacctgctcctcatcgcctctgtagacctctacactcactctgagtactacaaccatgccatcgactggcagacaggccctgggtgcaacacggctggtttcttcactgtctttgcgagcgagttatcggtgtatacactgacggtcatcaccctggagcgctggtatgccatcaccttcgccatgcgcctggaccggaagatccgcctcaggcacgcatgtgccatcatggttgggggctgggtttgctgcttccttctcgccctgcttcctttggtgggaataagtagctatgccaaagtcagtatctgcctgcccatggacaccgagacccctcttgctctggcatatattgtttttgttctgacgctcaacatagttgccttcgtcatcgtctgctgctgttatgtgaagatctacatcacagtccgaaatccgcagtacaacccaggggacaaagataccaaaattgccaagaggatggctgtgttgatcttcaccgacttcatgtgcatggccccaatctcattctatgctctgtcagcaattctgaacaagcctctcatcactgttagcaactccaaaatcttgctggtactcttctatccacttaactcctgtgccaatccattcctctatgctattttcaccaaggccttccagagggatgtgttcatcctactcagcaagtttggcatctgtaaacgccaggctcaggcataccgggggcagagggttcctccaaagaacagcactgatattcaggttcaaaaggttacccacgacatgaggcagggtctccacaacatgcaagatgtctatgaactgcttgaaaactcccatctaaccccaaagaagcaaggccaaatctcagaagagtatatgcaaacggttttgtaagttaacactacactactcacaatggtaggggaacttacaaaataatagtttcttgaatatgcattccaatcccatgacacccccaacacatagctgccctcactcttgtgcaggcgatgtttcaatgtttcatggggcaagagtttatctctggagagtgattagtattaacctaatcattgcccccaagaaggaagttaggctaccagcatatttgaatgccaggtgaaatcaaaataatctatactatctagaagactttcttgatgccaagtccagagatgtcattgtgtaggatgttcagtaaatattaactgagctatgtcaatatagagcttctcagttttgtataacatttcatactaaagattcagcaaatggaaaatgcaattaatttggttggtgaccacaagataaaatcagtcccacattggctcagttcaactagatgttccctgatacaaagagaacttgatttccttaaaactgaaaagccaaacacagctagctgtcgtacaagaaacagctattatgagacatgaaggagggtaagaattagctttaagttttgttttgctttgttttgttttttaactcaacctattaatcatctcttcacaagaatccacctgatgtgaccaagctattatgtgttgcctggaaaaactggcaagatttcagcttatgtggcctagcaaactaagaattgctcttcttggccagcctcatagcataaaagatgtgaactctaggaagtctttctgagtagcaataagtgggaattatgggcagagcacactcaatcccctgttgattaataaaactggctggacactaattaactatgggacttaaatctgtagaaatgaaggagtccaatggcttcttccaattttaaaactctagtacatccctttccctcaaatatatatttctaagataaagagaaagaagagcactaagtaagtagaatctgtttttcctattttgtagggctgctaactcctagtccttgaagcctagacatatgacccaggaaatttttcctttgtttcacttttgattatgatgtctgagccaaaaattcaattaagtaaacatactcgcctggatctgaatcattcatttaattactagatctacccagctgtaattatcaggccaaaaacagattcatgtttatataaaagagtaaacgatggttgcaaattttggctatttagagttgctacttcactatgaagagtcacttcaaaacacttcgcttgtctttagggatgatttttgccatttccagcccacagtatgatactaaagctgtcaagagaggtttcttcttttctgaaactgccagctctttccagccctgttgatcactggacataaaacttcttttccccaataattcttctttacttaaaatagtcaggatctttatctacagatgtactctccaggttacctgtgatgatagccccctaatgtcctgctagaaaagtctccaagcagagatgacattacttctgaatgctcataaaccacaccatgaaataaaagctctttgttgttttaagattgtggagtgtggttaatgggtccccacagatggttcctgctggactcacctggaatctctccacagccatacccgctcatcactatcattgagacctgcacatcttaatagaaatattataaacatcgaaaatcatgacttacctagaagttcgcttgtaactaatgaaattaaacaaatgtgttgccttttgtcatgtgtttctctcctgtgacattttgaaatatcacatcttgataaataatgtgtttcatcttgaatagctgaactaatgctttggaaacagagtcctagaaaagtgacttcaacagaattgttactaaaatttgcactcacaacatgaaataaattttcttcctatggaataatcgtg

SEQ ID NO: 84 - DNA, 176071 bp, Homo sapiens
  source 1..176071: mol_type = genomic DNA
cggggccagggcagcgcggactcgcgtcccgtggagcgttccaggcgggcgcgcggctttctccccagacccaccgagtggcggcggaggcgagatgcgcgggggcgtgctcctggtcttgctgctgtgtgtcgccgcgcagtgccggcagagaggtgagcccggcccgggtcctagggtccctgtcccccgcaggcgggcgggcgggggcggccgcggacaaagcccgtcgcgttggggctgctggagtccgggcgcgcatcctgatccacctcggagtgggtgtctcggccacgtgggtctcccgcgcttgccggggagggctggatggggacgccgctcctgccggacgctgcccgctctttgcaggcttaggctttaacctcctcgggctttggggttaaagcccagcctcgcctctggcttttgcgggacttcgcgacccaggagcgccatctacgcgagcagtgctgggggtggcgggagcggggcgcccggagcggggcgccgggggttgcttttagtgccccggctgcgcgggcgggggtggcggggctgttggccgggcgcgggggatgaatggagaaagagctctcccgagtcgccctcattgtccggctgcgcaagctgggtcgcggcggccgggaaagggcggattcctcggggcccctggcagccaagcgggctagtggggagagacgcggcgagaagggcgcccctagccagccgtcccgggcagggggacccgcaggcggcgtccagggcactgatgcgccttcccgacccgcgctttttgtgcaataggcgaagtggccaaacccgctcattcactgcgcgggattgaccgtgggcgcgccggggcgagggaccagcggagaagggagcaccttgcatgcgcgttgcaaggattgagaagagaaactcagagcgaattttcattttctgtttttgcgggcgggcggaaagagagagagagagaagaaagaaagagagagagaaagagaaaagaaagagagagaaagaaagaaaaagaaagaaagaattcttttcccttttgggggacaaccctagtcacccacgccacccctagagctgtcttcgcagcgtggcttcgtgttggctaggcagtcacaaatatttgttgaaaacatcttaatgtatgcagcacatgacaatgggcgtattcccacgaatataaacttcattaaaaaaaaattcgagtcaaaagtagtgggcggaatttgcagtgccctcgtgggaaacgtgtgtttgggcattgtgctgagttgtgagctctgcagaaacgcgaccatctcattcattcaagcattcatgatggaagcactggaccggagctggaaacgcagcattgaatagctgcgagtctgctgcgcagagccaggctgggaagagggaatttacatagttatcagccagaagaaaggagcctttggggagggagaggagccttaaaggattgcgaggggactcctgtctatcaggctgctgaaggtgaacaagtcccggtttcccacagggtagagaaagagcagcttgcctcagcttattgttccccgaaattgaaagtcttagactgaggagatggcctgaaggttgtcctggcccctcggggctcggcacttggcctggcggttatgagtggtttttggagaaagtgggacctcatggggctttcctgctttgagatgctgcggaaaacctcccagggcaggagccctttaatgtttcatatcgcattccctgtttgcctttttgccttccgcaccccaccaaccctcacccttcctaactagcctccttgagcagttttgattttttttttttgcagtctccgggctgcaggcaggagtggagtggcaccatctcggctcactgcgacctccgcctcccgggttcaaacaattctgcctcagcctcccgagtagctgggactacaggcgcgtgccaccacgcccggctatttttttttttttttttttgtatttttagtggagacagggtttcaccatattggccaggctggtctcaaactcctgacctcgtgatcagcccacctcggcctcccaaagtgctgggtttgcaggcgtgagccgccgcgcccggcctgattttttttttttttttaagaaacgattttgtgccccatgaatagcatgaatgatttgtaaagttgtgtgttttggtcaataatcctgacctgcaaatcacctgctagttagttgtctggtgttattttttaaaataacttattatctattgacattcagattgttagacgttccctgtcatttctgcagtctctctgggttaccttacagctcatagtatatgacctgatggctcactttcctttgaaatttaatgagtttcaagtgagctcctcctaagtattgaataggacgtattgtgtttgtaaaaataatgtgttaaattcatagctggcaatcacataaaattatggttgcttcatcacttttgttggaaactatcccttctttttttctaaaatagacaattctaaggacagaaaaaaatctacaagaaaattcacttcattctcatatatgacatagtattcaaatttagcaagtatgtgctccacagtaaagtatgcatgcctgaatggatttcagaggtgcgttttttcttttctgtcactgtattctctaagggcccatgaaaaatattgatcgtagcagttggaaacaagggtatgtgtaacagaagcctcactgcccacctcctacatagcctggactttagtccattctttttttccttcttcttttccagacattaaatatgaagcctacatctgtagttaatctagcatgattgagaattcaaatgcatcaagaatattagaataaatacatatactgatctttagtgtcttgtgccactgctttataattgcactgctttataaactcatataaaatgcttctgggaccatttatttcagggtaatgatccttgaaatgccctaccattttatactaattcattcataaaatcctatggatattcattttcatgtacagtaaattgttatggggaaataacacaaggtctgtctttaagcttcaggtgtttaattctctggctttactagctatggcaaattggggacataacgtgtgttttagtttcactgtctgtaaaatgggaataataatagtgcctacctgaaagggatgttaatgattaaatgaaataatgtgagaaaagttgttagaccagtatctagtacagagttaaccctcaacaagcaagtttatttatgttcatcactgttactattttataaagaactatatatttttaaactatattctccaaaatgcataattgtttagaaatttgaagtctggatttggaatcaaatagtcttgggctcaaatgccagacctgtcactttaattagctatggccatggctaagtttcttaacttctctgaatgtcagctttctatctataaaatggatagcattgatactattaaataatatgtgaaaaatattagcacagtgtagggtgtgtcataggtactcagtgcatgatggttattactgttacacctattgtacttgctcatcatcctggacatcatctctctttcattgctgaaatccatttggtcattgagacttattgattttacctcctgaaaatctgtgtagtctctttcccttttttcttttttttttttttttgagacggagtctcgctctgtcgcccaggctggagtgcagtggcacgatctcggctcactgcaagctccgcctcccaggttcacgccattctcctgcctcagcctcctgagtagctgggactacaggcgcccgccaccacgcccagctaattttttgtattctttagtagagacggggtttcaccatgttagccaggatggtctcgatctcatgacctggtgatccacccacctcggcctcccaaagtgttggtattacaggagtgagccactgcccccggcctctttcccattttttattctcactgctggctagacttaggaattgtttgtttttctcaggttgtttgtttttctcaggaaatagtgtgatggttcactcagcaggccagcagcctcacctgttctccctcctcagcagtgccatcactgtgatgtttctagaaacaccatctcgataaccgctcctactcttgtttaaaattcttcccatttctcaccgtttctttatcaaattacttaatgttccccaatgtgacttactttccttcatgtttaagcaagtggtcttcttccaaggtgtgcccttttcactccacatccttctccagggcccaccctataagtttagattatgtgccccaaacccctcactttataagatgcacaaaatgacagtgtcctgctgtgtcacattgggggtaaagcaaggaggctgggaccccagctggcctgctgtctcagagctgagaggcattatctgggatacgcctgcacctatttgtagctaactaatgtttcctggcacatgggctcttaagtgccggacacatctttcatttgggttctaaagaaccctggaaaatcttcccagctctctctctgctgaagtatttgttagacaaccttccctgtactcacagggctttccctgctcaatgctattgtcttgcctgtcatggggccaatgacttatctggctcaccttctctctcggccttgtcaagggcagggactgttttatgcatatctgttcattgctttgcagtgtttctagcagttagtagccacttcttgttgttgagctaagttgaaatgaacatctttatttaggaatcaagtaactttaaaaatattttgaatagctgggcgcagtggctcacgcctgtaatcccagcactttgggaggccgaggcaggtgggtcacatgaggtcgggagttcaagaccagactgaccaacatggagaaaccccatctctaccaaaaatacaaaattagccaggcgtggtggtggggcctgtaatcccagctactcaggaggctgaggcaggagaattgcttgaaccctggaggcggaagttgtggtgagccgagatcgtgccattgcattccagcctgggcaacaagagtgaaactctgtctcaaaaaaaaaaaatgtatatatatatataaaatacatatatgtgtgtatatatatatattttaatagataatccacatttatggtatgaaatgcaaaaggtactataggtagaaaaaagttaagacttggcttttttactctcttttgaggtaaccactggctttaattttttggataagcgtctaaagatgtttcttcaggtaacttttaaaagcaagctacatcataaaatctacttcttccctattagtgtaagagggacaccagtgattttctgccaaaacatggatgcatggaacagtatccctctgtccactgtcctcccctcatactaacttctttactggaccttgtgctggatattaacacatcatttagtaaatgtatgtacttgcaaacttttcaccttgcaacttgtccttccaagtagggctttgacagaaaggtattgttagagcagtgtttcctagatcttttggggtttaaaaacttgattgatttcatggcattgtactacttctaaaagtattgtttactatagtattaataagctatttttaagccatagagaattttaaaaaatatattttagaattttaagatttatgatatagagaagttgagtttgagaacaattctattacacgttaaggataagttaatgtattgaccaataagtatgacttattactggaacactatggcaggtacagaaaatatgtatttaaaaaaatttctaatgaagaagttaagtctacaccttgaatacagaaattaattgatagcgactggacagaactgtggaacttagaccttagctgaagtttttcgttacattcttcagaaatatttggatgaactagataaactatcatctcctaagaatgatgtatgtagttacttacaagtttgcaaataattcttttacttgttttatttctaaaatatcaatatgcatccatggacaattgaataaaccaaggcattgcaaaattaacgaggaggaaaaacccttcatagaagtaatttagttaaggtcatgaactttggttctgttggaacacgtctgtcagggagctatttcagcataaaacgccacacgatagctggattcattgtattttcatgtcctttatactgggtgtgacagtgcccagagtaaccatttgataataaatagcacagaatcttcccacttgtgtctttgttttctcaaggctggctcaggagagctttctttgggttaacttgttcctcatcttgcttgggggcaggaggcagacaatggaggcagagagattccaaatcagcttgggtagataacattcttgcctaggtaagcatttatctcgaagtgttaattcagaaatggtggcagagaaataccactgtgaaatcaccagtgtgacttcagtgtgcgtgcacattttttttttaatcaaccatttgaagtttgaatctcttcattccagaagttatctttgaagtctgatctgctggcccagcaggcagtatgactgacattcttgtgccagagaacctcctgtattgctggtgggaatgtcaaatttagatcaatgagtatttatggaaagtgccatcttttctcattcccgaaagtatttcctgcatcttgttccattgctccatagtttcctgccagaacttcaggagattctctatgacaatagcagtgttaaagaagatgcttaaatttagcagatgatttttagttaaaagagaacaattagaagtggggggggggagggaaaaaaaaccctcacaccacagttgattatggtacaccatacttttttctttgttttttcctttgacatggagtctcactctgttgcccaggctggcgtgcagtggctcaatgtctgctgactgcaacctccgcctcccagttcaagcgattctcctgcctcagcctcctgagtagctgggattataggcgcccaccaccatgccaggctaatttttatatttttagtagatatggggttttgccgtgttggccaggctggtctcgaactcctgatctcaagtgatccgcctgccttagcctctcaaagtgctgagattacaggaatgagccaccatgtccagcctacaccacacatttaaatgtcttccaaccttttggtaatgacagaattttacccacaacaagtggaatcttgttatctccagctcaggacaaggaattcgttctttctccagatggctgccctccctgtttctcctgttcttggcattcttttggttacctaggcttcatttccttttctgtttttctttttctgtatccccttatccaaattgtctctcttaattttgtttctttccttgaaaaacttcctgatctttttgttttagtttctctctgttagcactgcaaatgccaccagcctctaaaccagctgctatagtgtaactagccgcttttttttttttggcagcgggtggggggatggagtcttgctctgtcacccaggctggagtgcagtagcgtgatctcggctcactgaaacctctgcctcctgggttcaagcgattcttctgcctcagcctcccgagtagctgggatcacaggtgcgcgccactacaccctgctaatttttgtattttagtagaaacagggttttatcatgttggccaggatggtctcgatctcctgaccttgtgatccacccgccttggcctcccaaagtgctgggattacaggcgtgagccaccgcacccggccagccggctgctttttatcgggtctgtgatgctagctcgtgtcctttcatttaatccagtcccacactgcagttagagtaaccccgccaaaataccgccttcgtaatgttctccctctgctcctgcccacctgctatggccctcagtgatccctccaagttcagtcaccccgcccttctccacacctttctgtagctgaactattagcttccattgcaggggtctccttcctgtctaactgcacgtggtatattgacttgcagctgtgtgatttggttacatgactctctcacctgaaatgtactcccgtttcccactgaaaacctaaccagaccactcatgcacaggctgcaatataccaaccccaggacagcctcgatgtgatggcctgtttcaactgtctcacttctgaatctgcattgtattttgtgataaattggagttcccacccagccaaagttgccatccggtcctcttttgaatggctggtccagaatgacatgagccagtgtcaaaaagaagggacatttctgtttcgaagatcaaaaccttagctcccggcatttctttgaatacacagacaaccccaggggggttctagcattaaaacctgggtcattagtagccggagggcagtaacaccgaggaactccccacaggtagtcaggttgcctgagcaaccataaagccggtccccggactctggataacaaacccagccctggcacctctctgggtatgtggtccttcagcctcttagactttgtatcatccaatcaaatggattgcagttgatttgatctgggtaggaaccaaaatctgtgtttcaaaaaaccttttcccattttgtatccagaggcacaagaacctttccagttggtcttcaagcagaccctttgggtttctggttcaaatagttgtttccagaactcttcctgccactgcttgctttctgtccttgctgctgtgtcctgtgatgggctagcactctttccccacccgtcaaaatccacagtttgtctcttcagcccttttatctgaatctccaactctgccatttttacctttgcttttgtacaaactaagtttttccaactctttgcaacttcacccctggcttcatgggcatacttttgttcattctagaagtttggagtggggagaactggagataatgcatccacatatgaatgcttttggaagctcccagtgtttttctttaaaagggagttagctttttttttttttttttttttttttttgagacagagtctgtctcagtgcagtggcatggtctcggctcactgcaacctctgccttccgggttcaagcaattctcttgcctcagcctcctgagtagctgggaatggcctgccaccacacccagctaatttttgtatttttagtagagacagggtttcaccatgttggcggggctggtcttgaactcctgacctcaagtgatctgcctgcctcagcctcccaaagtgctgggattacaggtatgagccaccatgcctagctgggagttagcattttatttttatatttatttttttgagacagagtctcgctctgttgcctaggctgaagtggtggagtgcagtggtgccatctcggctcacagaaacctctgcctcccaggttcaagtgattctcctgcctcagcctcttgagtagctgggactacaggcacacaccgccatgcctggctaatttttgtatttttagtagagacggagtttcactatgttggtcagggttgtctcgaactcctgacctcgtgatccacctgccttggcctcccaaagtgctgggattagaggtgtgagccaccgagagagttagcattttttcttttctttttttttttgttattttttttatttgagacggagtctcgctctgtcgcccaggctggagtgcagtggcgcgatcttggctcactgcaagctctgcctcccagattcacgccattctcctgcctcagcctccagagtagctgggactacaggcacccgccaccaggcccggctaattttttgtatttttagtagagacggggtttcaccatggtagccaggacggtctcaatctcctgacctcgtgatctgcccgcctcagcctcccaaagtgctgggattacaggtgtgagccactgagaaagtattttagagttaacacctcattggagaggagaatagtatttccttataggagtattgtcatttctattcagtttttaaattttttttcatgcacttgatcattcatttattcactcattcatccatgcactgaagacactttgggacctccactcctccaggccctgggtcaaggatgttcaaaggtagtgtgtctggagagccctgttctcggctgccttcctcactgtgaatccaggacacttcttggcattcttagtgtatttgtttttgaagtccaaggaactgaaaagtgcatatatcaaaaggagttttctggctgggggcggtggctcacgcctgtaatctcagcactttgggaggcggaggcgggtggatcacgaggtcaggagatggagaccatcctggctaacacagtgaaactccgtctccactaaaaatacaaaaaattagccgggcgtggtggcgggtgcctgtagtcctagctactcaggaggcagaggcaggagaatggcgtgaacccggcaggcggagcttgcagtgagccaggatcacgccactgcacttcagcctgggtgacagagtgagactccgtctcaaaaaaaaaaaaaaaggagttttctccataagaaatgatgatcaagtaaggagttaaagtcataggagtggacattgccatctacgttctgcttgctcatattcatgtaagttaggggtgaaatgagtagtccaggtcatgggtcgaggaaagcgggggaggaggggcagaggcgtgcagcactggctggctgctttattggaggtgcggggtcagcttctacatcatatgccactgttggtgggtggtggctgtttcccttaggcttcctttcttccatggagaactcagagtcacctgcttggccagcacttctgtgtgtgtcagaagagcagactcaaacagtgacacagaagttccctctgtgggctgcacattaaatttcaataatatcaatacccaggtcttactcccagggattatagtgtgtccggtctggggtgggggtcatatcatttgcattttaaaaatgcttctggccgggcgcggtggctcacgcctgtaatcccagcactttgggaggggccaaggcgggtggatcacgaggtcaagagctcgaaaccatcatgaccaacatggtgaaaccccgaatctactaaaaatacaaaaattagctgggagtggtggtgcacacctgtagtccgagctacttgggaggctgaggcaggagaatcacttgaacccaggaggtggaggttgtagtgagctgagattacgccactgcactccagcctggcgacagagtgagactctgtctcaaaaaaaaaaaaaaaatgcttcccaggtgattccactgtgcagccagggttgagaaccactcagttaacatcataaactttgtaggtgaatgcagtttacacagcaatgcaaggaggcaggatctgccaccatccctcgctttgtctgtagggtgcaagttggggcattgatcccgtcctgcccaccgcagcccacagactagtgctctgtacataacagatgtggaatactcgggtcccaactgactctcctcatttcatgtctattttctgatattcccacagctctgtgaagtggggataacaacacccacacatctcagagctgtgagtaatccctgcacttagagaccacgttggatcagtgaagtggctcagggaaagccagtttcttctgtgtccccattgtcccttgtgtaatgttttttacttggaaagttctcacctgatggttcattgttgcacttgtgtttaaatgggtttccccacagtttagtcttgctttgctgacttggtcattcgccaagacccttctttgaaaaatactcttgatcatgtatgacatttagagtcctcaagttttgggataaagtctggtgttgcagaattgggtgttgattgatctggtgttgcactgaattgttcattctttaacgaattcatccaaaatttaaaaagtgtcctccatattcaggcattattctgtgccgcatcccttctttctcaatgcctttaaatggacaggtcacaggagccttttctttgggattatctgggccacccccttcttcccttatacaacctgctgatctcctcttgcaccttctcatgtctggcgactccagggtctagctgtctttattcacctactgctcctgtcctcttctgctcttgtttgtttatttatttatttatttatttatttatttatttattttttgagatgaagtctcactctgtcgccgaggctcgagtgcagaggtgcgatctcagctcactgcaacctccgcctcccgggttcaagcaattctgccacctcagcctcccaagtagctggattacaagcaccagccatcatgcctggctaatttttgtatttttgtagagatgaggtttcaccatgttggccaggctggtcttgagaactcctgacctcaggtgatccacctgcctcggcctcttgaagtgctgggcttacaggtgtgagccactgcgcctggtctgctcttatctttaataattgataattcattatgcacttgcttttctggcctccttcagaagttttcctcaatatttggcttattatttctcttccacccaacaaaacgagccattttcctttccatatccctgtcacactcagacatacatgcacacacacaccccttacacatctgcctatattgacttacagaccagctgcctacctggcttccctgctacaggcacttggggaggtatcgcactgaacccaaccgagcagagccagaacctgggcctgggcccgtctgcagggtagagcaggttcttctggaagggccagtccagctgcaagtgctgggatgaagtccaatgtagcatgtaatgtaacagttttccaagagcccagaaagctgttgacattggaagttccctctgagttaatggactgtgaggttgaccgtgtcatgccatccctgttgaattgcttcaatggcatctcattctctattgagtgggacttctaaggccctgtgtggtctgaccctgcccagacctctccacagcctcttctcccactgctaaccacatctcgaccattctgtgatatctgtagttccatcacgggagcttcatttcacctatggcactctgacggactccagcccaccctgtcatccttcttattgtttccatagcgatttctttgtacatctgaccagtacaccatttttcacctatttgttgacttgcctgtctctccttaagggccgagagttttgcctatatttgttatgcctagcacagtgcctgacatacaatgtagattctgtaaatatttgttgagtgaacaaatcccaatacagacaagcaatggaaatctgttaatagtaggtattggctggacgcggtggctcacgcctgtaatcccagcgctttgggaggccgaggtgggtggatcatgaggtcaggagttcaagaccagcctggcccacatggtgaaaccctgtctctactaaaattacaaaaatcagccaagcgtggtggcggtcgcctgtaatcccagctactcaggaagctgaggcagagaattgcttgaacctaggaggcggaggttgcagtgagctgacatggtgccactgcactccagcctggcaacagagtgagactccatctcaaaacaaaaacaaacaaacaaaaataatgggtattatttagagaccagacagacggacagaggggttagggcagtaactagtgaggaagcagagcgaagatccgctggggaggggcaggggctggctccagaaggctaggagacctcagtgggtcacccaggcaggatttttttttttttaagacggagtcttactctgtcacccaggctggagtgcagtggcacaatctcggctcaatgcaacctccacctcctgggtttaagcgattcttctgcctcagcctccctagtagctgggactacaggcacccaccaccatgcctggctagtttttttttggtatttttagtagtgatggggtttcaccatgttggccagactggtctggaactcctgacctcaggtgatccaccacccatctatctcggcctcccaaagtgctaggattacaggcgtgagccaccacaccaggcctcaggcaggatttaaaggtggaacaaggaagaatccaggtaaccagactaagaaagagaatggatagaacttttggaaccaaggcctctgctcacattattttttttattttttatttttgagatggagtctcgctctgtcacccaggctggagtgcagtggagcgatctcagctcactgcaagctccgcctcctgggttcacaccattctcctgcctcagcctcccgagtagctgggactacaggcgcccgccaccatgcccggctaattttttgtatttttagttcaccatgttagccgtgatggtcttgatctcctgacctcgtgatccgcctgcctcggcctcccaaagtggtgggattacaggcgtgagccaccgtgcctggccggcctccactcacattctaaaccagaatacaaggtcaggaacaagccagcagcagaaacaagaagttcagacactctctgcactcatgagtggagtccaaatatggttacagaaaatccacagaatctagtaaccaggaggaccctgatgacttgaagacattattaatctggcatgttctcatctacccaatcaatgcaaagaagaaatggattacattttttgtaataggattatttactgatgatgaatattccattcagccttaaaacttacattatactcaacaaaaacttatttctagatttagagccactgatctctagccagaaattcattaacacacatagtcaacaagtatttgttgagtatctagaaagtgccatacaggtgacaggtggaccttgtactccagaccccagtgctaggagtcaagcatgagaagtgtccaagaatcctactaagtgtgttcctcagttcagatttgggagcggtttctgtttctgaaagtctcagacacctgtatcactccacttattgctgtgggatagtatcatcgtcaacagaaagagaattgtaattaaacactacatttctactgcatgaagtctccttttaaagaatatgacttcaaaatactctaatgtgactgcagacttgttggcatttgctgagtagtgatatttttacgtatagtagaggtttttcttttttttaagggaactctacctgcatggctttaaagggctttctttaagtgagagaacagctgttctcctccaggcgttctgggctaagacttcctcctcctctcaggaacagaacaaaggcatacagaatttatgtcatagatggatttttgtttgataaatatcacttattactaaacaaaagaatggcccattctctttagaaatatgagcataacatctcctttgtctttagtggtttctaactttgttggtttacttttaattattataattgactgaatttaaatgggccgtgttttatataatcaaactttccttgaaaatgtatgtataagatggttattggtaaagggaataatttcaaattcaatattaaaataaatccaaaataatatttgaaggaatcagctaataaagaaaataaccctttggtcactgttgtaggggccagatgtggtggtcacacctataatctcagcactttgagaggctgaggcaggaagatcccttaagcccaggagttcgagaccagcctgggcaacatagggagacccccccagctctacaaaaaaaaaaaaaaaatagaaattagccaggtgtggtggcatgcatctgtagccccagctacttaggatgctgaagcaggaggatcacttgagcccaagaggtcgaggctgcagtaaactatgattgcaccactatattctagcctgagccacagggtgagaccccatctctaaaaataaaaatataaataaaacgtgtatccactttttggtggataatggaagccactgaagaagatggaggtacacgaggattggttagtccctacaatctgaccacatagataatcacaagagaataacttggatccaacacgcacttctgcaatacacattatgaacatacctttactagcaagcagactcataacaagtcctaggccatatccttcaaactgatagtcacagctttctgtctttttgggtattcagacttctctcttggtgattggccgccttcctaatgctggatacaggacatttcagggatcaagcatcaggttccatcaaattccttcaggatgtgagtttcaggccacataaatttataccacttacttacaagagtgaggagaatctctgttttaacagttttattgtagtataatttacataccctaaacctctgccaattgttaagtgtacagtttaatgttttttagtaaatttagagtgctatacaatcacagtctggtatgaacctttccaagactgcagaaagtgtcatcattttcatttgtgcccagaaatcttctgctgtctgtactttgggaagtgcctgttctggaaatttcatatacatggagtcatacaaaatggagtcttttttttgagacagagtccagctctgtcataccccagctctgtttcccaggctggagtgcagtggtgtgatcttggctcactgcagcctccacctcccgggttcaagtgattgtcctgcctcagactcccgagtagctgggattacaggcacctgccaccacccctggctaattgttgtatttttagtagaggtagggtttcactacattggccagggtagtctagaactcctgacctcaagtgatctgccagtctcggccccccaaagtgctgggattacaggtgtgagccacctcacctgaccaaaatggagtcttttgtgtctacttctctcggttagtgttttctaggttcatctattttgtagcatatgtcaataatgttctactttattgctgaatggtattccagtgtgtagatacaccacattttatttattcagtcatcagttgatggacattttgattgttttcaggtttttggagctatcaagaagaatgctgtaaacattcacatacaattctttgtttagatataggtttcatttctcttgagtgaaattcctaggattagaatatggatcgtgtggtaagtttgtgttttccaaagtgtctgcactgttttacagccctaccagcagtgtctgagtgttccatcttccccacattcttaccaacactatgcattacctgatgatagacatacagtgagttcaaagtggtatctcatggtattattttgtatttctccaatgattaatgacattgagcatcttttcagatgcttcttagccattcatatatctttggtgaaatgtctattcaagtattttgcccaatttttaatcaagttgtttatattcttagttaagagttttgcatatttcctggatacaaagtctttatcagacatgtgatttgaaagtattttctcccagtctatgcttgtcttttttttttttttttttttttttgagacaaagtctggctctgttgcccaggctggaatgcagtggcgcgatctcggctcactgcaagctccgcctccctggttcacgccattctcctgcctcagcctcctgagtagctgggactacaggtgctcaccaccacacccggctaattttttgtattttttagtagagacggggtttcaccgtgttagccaggatggtctcaatctcctgacctcatgatctgccctcctcagcctcccaaagtgctgggattgcaggtgtgaaccaccgtgcctggcctatgcttgtctttttgttttcttaatggtatgttttgtagtgccataggttttttttattttttattatttttatgtttgttttgatgaggtccatttgatcaattattttcttttgtgggttattcttttggtgtcatatttgagaatttctttgcctaatccaagatcttaggttttcttctggaaagtttataatttagctcttaaatttagctcttatgatccatttgagttagcttttgtgtatggtaaggagtcagggtgtaagttcatttttttttttgtttttttttaaatttatttattttttattgataattcttgggtgtttctcacagagggggatttggcagggtcataggacaatagtggagggaaggtcagcatataaacaagtgaacaaaggtctctggttttcctaggcagaggaccctgcggccttccgcagtgtttgtgtccctgggtacttgagattagggagtggtgatgactcttaacgagcatgctgccttcaagcatctgtttaacaaagcacatcttgcaccgcccttaatccatttaaccctgagtggacacagcacatgtttcagagagcacagggttgggggtaaggtcacagatcaacaggatcccaaggcagaagaatttatcttagtacagaacaaaatgaaaagtctcccatgtctacttctttctacacagacacggcaaccatccgatttctcaatcttttccccgcctttcccccctttctattccacaaaaccaccattgtcatcatggcctgttctcaatgagctgttgagtacacctcccagacggggtggtggccgggcagaggggctcctcacttcccagtaggggcggccgggcagaggcgcccctcacctcccggacggggcggctggccgggcggggggctgacccccccacctccctcccggacggggcggtggccgggcagaggggctcctcacttcccagtaggggtggccgggcagaggcgcccctcacctcctggacggggtggctggccgggcggggggctgacccccccacctccctcccggatggggtggctgccgggcggagacgctcctcacttcccagactgggtggctgccggtcggagaggctcctcacttctcagacggggcggttgccgggcagagggtctcctcacttctcagacggggcggccgggcagagatgctcctcacctcccagacggggtcgcagccgggcagaggtgctcctcacatcccagacggggcggcggggcagaggcgctccccacatcttagacgatgggcggccgggcagggacgctcctcacttcctagatgtgatggcggccgggaagaggtgctcctcacttcctaggtgggatggcggccgggcggagacgctcctcactttccagactgggcagccaggcagaggggctcctcacatcccagacgatgggcggccaggcagagacactcctcacttcccagacggggtggcagccgggcagaggctgcaatctcggcactttgggaggccaaggcaggcggctgggaggtggaggttgtagcgagccgagatcacgccactgcactccagcctgggcaccattgagcactgagtgaaggagactccgtctgcaatcccggcacctcgggaggctgaggctggcggattacttgcggttaggggctggagaccggcctggccaacacagcgaaaccccgtctccaccaaaaccagtcaggcgtggcggcgcgagcctgcaatcgcaggcactaggcaggctgagtcaggagaatcaggcagggaggttgcagtgagccgagatggcagcagtgcagtccagcttcggctcagcatgagagggagaccgtggaaagagagggagagggagaccgtggggagaggggagaggggagaggggagagggagagggagaggtgtaagttcattttttgcatatagatatccagtggtcccagcaacatttgttgaaaattgccttcgcacctttgccaaaaatcaaatgaccataaaaataagtatatacttttggactctattttgttctattgatctatgcatctgttttatgctaatatcacactgtctggacttctttggctttatagtaagttttgaaataggtagtgtaagtcattcaactttgttaactttttctaaagtgctttaactgttctaggtcatttgtatttccaattgtatcagcttgccaatttctacaaaaaaaaaaaaaaaaaaagccagctgagattttgatagcaattggatggaacctacagatcaatttaaggagaattgctgtctaacaatattgaatcttcccgttcatgaataagaaatatcttttcattcatttaaatcttctctaatttctcccccaaaatttttataggttttctgtgaataacatttctttcattgaatttttcttgaatttctttcattcttttttttttattattttttttgttcaagtattttgttccttttgaataaagaagcctggtgtggatggagagctgatccagcccttctgtggctctcctgtttccaggatctcgttattacaattttggctggtccagctatcggttgcatgcaccctactgggactaaaacctcaggctagcccagctgtgagctttccccattcattttctaccaagttcactacttttgctgataagatcattaggcatgtgcttctgctctgctctgaatcaagccagccttctccatcagtggagctgctggctttcacggctagccctgccttaggaaactcccctgccgacgggctggggtaagaatggagctgcctctgctggaaggacgctctcttccacgcatcttacccaaaactctagcagcttttcctaaagaaaagcttgccagtttgttgtttgtcttaagatgattttcagagtcctgaaatggttgcttttgaaaactttgttcacttacataatttttttgggtgggagagaatttgtcaacttccttattatgccatagacaaaagttgctctatattttatatatatacacatatggaatggggtgggggagagatagagagagagagagagagtgtcttgcttggtcacctagactggattgcagtggtgtgatcacggctcattgcagccttgacctcctgggctcaagagatcttcccacttcagcttcctgagtagctgggactacagacacgcactaccatgcccagctaattaaaaaaaaattgttacccaggctggtgttgtactcctgggctcaagcagtcttcctgccccgacttctcaaaatgctgggattataggtgtgagccacgatgcccagctctaaaatgtaattgatatggagaccttgactaccatgaatttcaccagtggaaatctgtttccattagtcatcatgccattaacaatccactgattttactaatatcccattgctatattctccctggtaattaacaaagtgctgctgtcatggagacagaaagagcagggtgcctctggaatgtgggcagtattccggattggagaaccaccagctaactatccaggaagacacatcacctgttttaatactagctgcttaacctgtgtctctcacacacacatataccataccacagtctatactgaagtattttctttttttttgagacggagtctcgcgctgttgcctgggctggagcgcaatggcgcgatctcggctcactgcaacctccgcctcctaggttcaagcgattcccctgcctcagccttctgagtaactggaattacaggcgcctgccaccacgcctggcgaattttttgtatttttagtagagacggggtttcactatgtttgccaggctggtctccaattcctgacctcatgatctgcccgcctgggcctcccaaagtgctgggatacaggcgtgagccacagcgcctggcctactgaagtgttttcaagctatttaactggattttcacctttagtcaaacctcactcagttaatgtctccagtttgagtaattgtcagcacactgaagtaaaggagaattccgtgggaattgcagtccctgagaggaaacagatgccaaattcaaagaagggctctttgggctgcttgggcccatagccccagaagctgaaagagagctggcactctcctggaaaccaatgaggcccttaaacttgccagccttcttcagagctggagcctgggggctggagacaggaaggggagggctcctggaggagaaggggtagaaagtgcaaccaagaactgaaagggagaaaattcactgttctgtgtgtacatcatagtggggggtgtagtgaggatagaccatttgagtactaccagtttgttttaaaagaaaatacattaaacaaggctcgcataaatgtgatttaagagagtaatctattaatgtggtccagcctgggttttgattccttcattaccaaagtgtggacataaagtaaattttccgtcactgtattatcataatacaaatatagggaagaacttaggaaatcaaaggaaacaaattgttaattttttaatgacagcagaggagagagagagagagagagagagagagagagagagaaaggtcctgaggcaaccagggaacagcttgtcaatttctacaaaaaaaaaaaaaaaacagtcaagggatattgctggaatcggatagaatctatagatcaatttggagagaactgctatctcacaatgttgaatcttcctatctacaaataagaattatctttttattcatttagaacttcttcaatttctcgaaaaatgtttataggttttcagtgtattggtcttgaatttattttgttaaaatgtttttcctaaatattttattctttttgaataaaactgagaaatttatagttctgggcactgcctgtgtggatggggcctgaactgcactggtttgacttaatagatttccctggttgttactgagttgaacttgttcctatgttgtgtccttagttttggaacccttgaagtttttcctcttaacagtaagccaaaaacctttgttttaactgaagtaccacattgcctttaaaaatagttgctaaaggtctccaagacttggatgaagagtgaggaatctggagttctagttaaatagtgacagaaagctgctggaaggagtgagagcttatgaagcagtctgatgatcttgtgccaagtttggctgaattggttaaactcagggtgtttgagctggaaaaaaggtccaggagatcatctaatatcttttttttttttttttttttttgagacggagtcttgctctgtcacccaagctggagtgcagtggcgcaataatctaggctcactgcaacctccgcctcctgggttcaggccattctcctgcctcagcctcccgagtagctgggactacaggtgcttgccaccacgcgcggctcattttttgtatttttaatagagacagggtttcactgtgttagccaggatggtcttgataatttcttgaactcagtgcagcatcccctgggaacttgttaaatcgaagtatctcagccccactccagacctactgcatcagaatctgcactggaaccggatacccaggagatttgtacatgtgaaagtggagaagcccttggctgggcgtagtggctcactcctataatcctggcactttgggagactgaggtgagcagactgcctgagcttaggagattgagacaagcttggacaacgtggcaaaaccctgtctctactaaaaatacaaaaaattagccgggcatggtggcacacacctgtagtcccagctactcccggaggctgaagtgggaggatcccttgaacccgggaggcggaggatgcggggagccgatatcgtgacactgcactccagcctgggcaacagagagagattgtctgaaaaaaaaaaaaaaaaaaaagttgagaaaccctgcagtaattcttatctctctaccttgtgcataattaaatcttagttatcaaatgtgtgaatgctaaagggtcatcttccatctaccttaatgttatggtattattaatcaaccttagatcatgttagcatttttcctagtgctgttctcacattgtgcacacctctcacagagaaccataacatcttttccacctttgccaggacttgctgtgcttgcaggtggattttgggggaaaagtggaaggtgctgtattgatccctactaaacttactctggttttattttggccactcttgagattcccctaattccatgtacttttcacacatttgatgcctttttttttgaccgagtctggctctgtcgcccaggctggagtgcagtggcgcgatcttggatcactgcaagctccacctcccgggttcatgccattctcctgcctcagcctcctgagtagctgggaccacaggcgcccgccaccccgcccggctaattttttatatttttagtagagacggggtttcaccgtgttagccaggatggtcttgatatcctgacctcgtgatccgcccgcctcggcctcccaaagtgctgggattacaggcgtgagccactgtgccccgccatttgacgcctttttaataccattatctaagtcaggatttaaaatattgaacaaggaagtgttgggtacacagcatggaaaacccagttctctgctcctcaattcggtatactttatgttgcttgcgtcctttttaaagaccacattttgggaaaatatactccttcccaggttttccccatgcgattgcacctgtgcggtgaatgagcatgtgctgccaccacaggaaattgattcacatggagacctttgggatggccagcagaagagactgagaagttgcttgagggaaaccacgagtctgtattatgatgtatgatgtatgtatgtagcatgatatatgtagcgtggagaccaaaagaaacagggtttaagaaagagagaaagatcatttttgacaaaagctgctgcaagttcaagtgtactgaaagtaaactgcttgttgggtttgccaagatggaagctatggagaccttgcaaagggcattctttttttttttttttttttcccgagacagagactcgctctgttgccaggctggagtgcagtggcctgatcccagctcactgcagcctccacctcctgggttcaagtgattctcctgcctcagcctcccgagtagcggcgactacagtgcgtgccaccacgcccggctaatttttttgtatttttagtagaaatggggtttcaccatgttagccaggatggtctcgatctcctgacctcgtgatccacctgcctcggcctcccaaagtgctggcatgagccaccgcacccagccggcattcttagtgattaaaaggaacagcttctcagttggaactgagtgaagagagaatgtgaggcaaagaattggagacaatgaagacaattcttgttatatacagccttaatctaggaatagccttttgaaaaagagaaaaactaccaggttcaaagtatatgtgcttataaagaggtggcttcatttcaggggaaaaatggtactagaactgagaaaatatagtgttgtatcaatcccagtgagaatgacaccaaaataatttaactctgtgcacctgtgatcagagtgttttgttgttaaatatatttgtctgccattggtgcataaggtaaaacgtaactcaaatgatttctttgtctgtaagatgaccctttagatatgtactggaataaaagtagctctaatcctgtggatccagccaccttggggtcttcgtgctggtgttctgttagagatggtgatgcatttgacatctcaagtgccaaatgatttgatcggaggtactggtcactggacatttttaaggacaatttcttattgcagttaccactaggcacatgcaggaccagtcatgtaaattgaggagccagtgcaaagtgaaaatgtgggactctttctttaaattattaaacatttcaacagtttcagcatagcactaaacgaaaagtgattgtgcaggtcacatactcatgaaatggtcctcagcacatgccccgcgatagtgaaacaaggatgctaaagttttaaagcataagcaagtaaaatctgtacaatcaagtgcagaagtggcagaagaaagggaaagaaataactaagaccttcagggttttgtagaaaagttcatggcctttggaagtgtttgggctggtcagaaaactggtgttttaagtatttaaaggatataaatattgtaagtgtcataaatgatataagcaaaatttaatatagctgcattttaatccaacagtgttgtcattattcaacttaaaggctgcatttgcttttttatttttcacctgtaaggatttaggagagaggtacagtgacttctcaggacaatgggaatgatatgaaattttaaatgtgttgcatattgtggtgctattgtgttttgcgtaagtgcaataataattttaatcaggtagaacatttaaattgttgtccttggaaacaaaagagaaaactgcttcacgatgaatgaattaaagttcttttctctgccaactaaacttgtatactaaatgaaaaatcacagagtcattgaatatgagcatttaaatgaaccattgtgagaggagtaagtggatactgataacatactgtttttctgcagaaaatatttgtggttaacttgttcataccatgtgtttctcttacaatcaaaacctctgtctttttcaaggacaccttgagcacattgctagggaaatggaactcttaacaaaaccctgctaaatccttctgcttaccaccccctcttgttttctgattaaacttctcttcatcgtctcacatgaggggggaaaagaaatcaacttgttaaatgccagactcccaggagtttggatttgacttttctctcactgtttgtatggggtctttattccctccctccctccctctctccctcccttccttctctctctttttctctctctctctctgttctctttctttctttcaatatctctccctgtctttctttctcaccacccacatattttcttgtcctgtgttggaaagggctttggtccttgcctggtggaatcgctagaatatcttaaagcttttcttttactaacagccatcaatgattactttggtttagtccaaaaaccaagaatttgcttttgaaggagggggttattctccccttagtgtttctgcatcaagctgaaagagctccctgcttagagtaagtcaagtcaccttccttaaaaaaaaatactcccaggtgttagagatctctttattagagtcataaaataactactggttattttaaatagttccctttggaaatgagagtctcgttttacattaaacaggcaagactttgatatatttcacatatttaagccttagctttgattttttagtcatactgagaatactggtctttgagacacaaaatgagttcatttagtagtggtttaaaataatttttaacttataacaaataactggaaacagaatttctttaagcaggggactcctgttatgggaacatgtttggtggcaggtttcccaggggagaggatccgggaataaggaagcacttattgtagggtgccattgccacttgctgatggctcagaagtggagctgaggcctcttggaactatgtagtattgggaacgcatgttcatgtatacttaattttaaaacacacctactttatgacacgtggctatatttgtattgttttctggggaaataaaaggtttgagtgaagatgaatttcgccacaacttgtaaacagcccccctgaacctgttggggatgcattgctccaaatcatttcagtttaatccttcccccatctccacccctcacacctttcctatgtgttcacagccctcagcattcacggagaacatgtccctgaaaacgtgctggagcatcaagtgcaagaaatcagataataattatgtttgaagagggtgattttattccccaggagaaataaaacctcgctcaggcaacagggggtttattgaggaccggggctggaggcagctgctgccaggcccacgccaggtcattgggccttcgcctgagctcttggcttgagcccctcccactcaccttcacaatccatgtgggtgagaggtcatgggcctcctggctgccttgttcctgagatgcacgggatcctggaagaggaggtagggcaaggacactagcagagtcacctcaccaccaagtggaattcttcctctgcccttaactccttgcaccttccctaccagcgttttgttttgttttttttgcccaggctggagtgcagtggcacgatcttggctcactgcaatgtccgcctcctgggttcaagtgattctcctgcctcaatctcccgattaggtgggactacaggtgcttcaccacgtctggctaattttttgtatttttagtagagatgaggttcaccatcatctcctgatggtggtctcgaactcctgacctcaagtgattcgcctgcctcagcctccgaacgtgctgagattacaggcatgagccaccaccctggcccctagcaggtttctttacctttatggtcccaattaatccctttggcagagcttgtggacctattctcagcatggtttttgttgctgttttttttagagacaaagtctcactgtctcccaggctggagtgcggtggcgaaatcatagctctgcaacctcgagctcctaggctcaagcgatcctcttgcctcagtctccccagaagctgggattacagacctgagcctccgtgtccagcctcttgacatatttttaaatgcataaagaatatattagacagcaggcactgtggctcacgcctgtaatctcagcagtttgggaggctgagatggaaggattgtttgaggccaggagtccgaccagcctgggcaacattgagagactctgtctctacgagaaaaataaataaataaaatcaaccaggcatggtggcatgcaccctagccccaggtactcgggaggctgaggtaggaggatcgcttgagcctgggagttcgaggtggcagtgagctgtgattgcaccgctgcactccagcctgagcaacagaataaaaacctatctccaaaaaataaaataataataataataaataattttttaaaacaaaaaaagttagaaagaaagccaagtatgttgaaattcagtgttacccatgcatggctagctccctctcattttttacataacccgttcagtgttacctcctgaggtgctttcccttctcggcttacgtgacaattaaaagattgtgatttacaaacatgcagttaacttacaggggcataagtactcagtgtggcaaagccaacagcagcaagaacaataagatcaaatgagaaaagggcagggaggacggaggagacgaagggaggaagggaagggggaacgggcgaatcgtgctatgaggccatgccttgacgagcccctgagctgagctgaggtcagcctttcctttaggcctctcactgtgcacatttttctgggctaagagtatttcttctatttcgaggtatgtgcttttcatacccagtggcccctaaaggccaacccacttcttcttctaaaacttaagagaaacagagattcaaatatatgagctataatcatgaaagactaattatatttgaggaaacttagtgataccccctgataatatgaacataataagagcagctatttgttgagatcttaatacattgtatgaaaccctttacctacatgatctcattgattgctcacaaaaacgcctgggtgccgtgcttctcatcattcatatagagagactgggaggtaaagccctcggccaaggccacactgatggcagccagtagacctggaattcacactgggggctgcctgacttgaagcctgtgttcttcctctttatcaatgccatctttcctaggcactagcgatttcagagtttggattccaacaaaatccaaatacatattgatataaaaatacataattagaattaacatttccatttgaaacctggacacacaggttagacactcaatatgctatatttgaatagaatttactgtcttgaaataattccgcatgatgtaggtttactcacatcctgaggagtgggccaggggaaggaagagctggttgccatgggcatcggctggaagcaaagccatcctccaggatcctctggcttcctgagccaagatggcgtggagcatcatctgtttctcttccaactcatcttatggtggaagttgtgaaggagcaactttcctgccagtgctccaccccttattcacccattcctattctggaagatagtgataaaatctgattcttaagaattggaaggttaacctatgaagggatagatttaaagacttgatgaactttgattttacctgcaatacctcaaccaggacttgttactgctaccaaaattcccacttattatgacatttttgtcatctttctgaagtcattacaggacattttatagacctttctttttttagatgaaagggtcaacttcagtccgacgcacaaagaagcaaagaataataatttttctctctatttctatttgcttcttttgtccaaaaagatcaaagaattaccaaattatttctgtccacccttgcgcacactgaatggagaaaagtttttctcacttcattttctaaatagagagatcatggtgggcagatttagctggtagtttactaaggtaaaattaagaatcacagcatctcagaaaaaaaggactcatagagatactcatttaatagctgaggaaattgaggctgagaatttgacttgcccaaagacacagagtcggcagcaggctgagtctagattttaggtgctcggtcccgtgcgcctgtgtggtccctgagggagaggcagagggatctccttccttcacttactcattcttccactcaggcattatcgtcattcacgcgagccagacactgtcctagggccgtttttgtttttattttttggaaaaggatagtgggggagaagaactggggagagacaggtcagtaaattcatgatctctgtatgaatgataagtgcagtggggcatgctgagctgaggtacaaccaaagacattcgcctggggttcaggaaagatctggacttggctggaaggatgaatagggcgtgaatggatctatgaaaggtacaaagggaaggaaattgaaatggatctaaagagcatggagaggagtcagtgaaagacgttgtatctgttcctgtctgaatgcatgcccttctatttctgcctagatgatgcctgctcatttctcttgctctagaacatctcctcaaatctgttttcaaatattgctgcagttttaatgttatgtttatccacatcggtgagaagaagcttctctttccttcttggttgtgagaaccctggggtcaggaaaagctcggtcattcatcatagtgccctgggaggtgcctggcacagtgctgcacacctaagaggtgcttgttaaaagtttattgaccttaatcaaacattcattctcagccgctttttctgacgcatatgtgtaaatcatagatatgttactgaataggaatccagccaccctcctaaaattcatgtcattagaataccttaatcttattaacctggaatactatgttattagaataccttgatattattatcctggaatattattaaatagttccagaatttttcactaaatcatgctatttgtagttgttagaggtgctgtttttattgctcagtcaggtgactaccaggtttcaaagaaagtgctgattaacagggtagcttctttctaataccagacttctctgatcaaattatagatgttcacttgggcgaatgggtaagattaagggtaaaataggccaggagcggtggctcacgcctgtaatcccagcactttgggaggctgaggcgggcggatcaggaagtcaggagatcgagaccatcctggctaacgtggtgaaaccccatctctactaaaaatacaaaaaattagccgggcttggtggcgggtgcctatagtcccagctactctggaggctgagacaggagaatggcatgaacccgggaggtggagcttgcagtgagcggagatcgtgccactgcactacagcctgggcgacagagcaagactcttgtctcaaaaaaaaaaaaaaaaaaaaaagaagaagaagaagaaaaaaagagtaaaataaatggaaaacaaaatggatttgtatgttttttaaagatcacaaatttctcaatttagattgagaaatttagaaacttaaattcctacttttccaaatttctccatggattgaataagtagctttgtttttcaaaataaaaactcccaacaccagaagccaccctgattattcaaccctataaaatattcatattctcttgtttcattctggaaaaaaatgatctggaaatattgcctcagatcctgtagctaagaattgcaaatcattttcttttcagaacatcaccttgattttgagtatggatcaagcaaatacaacattttctagaactcagaaacttttttttttccaaaatggaaaaaaaacctcatacttctcttacacacaaatgaattaagactttgaatgcttggcttctgaatcatttgaaaaatattggcaaagaagttgttgtaacaagtctcaggcctagccaacattttagatgctttggttttaagacagggaagatatattctgctgggaagaaatccaaaaacctctaaaaatgaattataaactatctggaagtgtctcagctgtggtaattatggtagtagcattgttgtctgccaccttggtggccgtttttcacctaatgtttataagagaatcttccagtaggttaacatgatcctgaaatgcacttcaaaaggccaagtgtacagaaagggtttaaaaacagtaactgctagtgagtgagaaggaatttatttcatgctcgatggagtttggctttataaattttttagctgctggttaaatccacagtagaggaatgattccattgtgtgtcctgagtggaagaaaaaagtaaaaattagtatcacagtaacagtaactgaagtgaataacatttctcaacaaaaaacatgcagactaatttattaagtccttgatgaagtagtgggaaaactgtgtcacgccacatagctacagtcctcgttctacccttgatttttatgtgtaaaaccaaacatagcttcttggtactgtcctgatcctaatgctccttctcactctctgatttcctatctcacctcctgctcaatggtcatgtggttcccctttattgaactatttcagtagtctgcaatgagtcagcaaccttagggactttaaaaaaaattctatttaccagtctgggcaaaaagagtgaaaccccatctaaaaaaaaaataaaaattctgtttaaaacatgcttgctctagtacacatttctaaccccacagccccaccgccgctttttttttttttttttttttttttctgagacagaatctcactctgttgcccaggctggagtgcagtggcgtgatctcagctcactgcaacctccgcttctcaactttaagtgattctcctgcctcagcctcccgagtagctggattacaggcatgtgccaccatgccccactaattttttttgtaattttagtagagatggagttttaccatggtggccaggctggtctcgaactcctgacctcaagtgatccgcccgcctcggcctcccgaagtgctgggattacaggcgtgagccattgcgcccggccccaaccttctttcatcttctttcatcttggaacagatgtggttctttgcaacaaaaggatagtgattaactatgaaaagggagtaaatataatatgtaagacatcatttttagtgaatatttttttccaaatattagcttatctgagaaggaagatttagttttagtgaaagacaacccaaatatttttatgaaattaattatttgaaggttttacttgcataggcatgctaatgaagtatatttcttctaaatatactttcaataaaaaagcaatctttctttttattaaaagtatatttagggcccggcgcggtggctcaagcctgtaatcccagcactttgggaggccgagacgagtggagcacttgaggtcagaagatcaagaccagcctgaccaacatggtgaaactccgtctctattaaaaatacaaaaattagctgggcgtggtggtgcgcatgtgtaatcccagctactcaggaggctgaggcaggagaatcgcttgaacccgggaggtggaggttgcagtgagccaagatcgtgccactgcactccagcctgggcgacagagactatgtctcaaaaaaaaaaaaaatgtatatatatatatatttagaacagccaggtaagaaacctgtctagtgcaaagaactacctgatgctgattactataactgagatattattctccaaaaacagttaaatttatgttcatgaggtttgagctgctttttctcagtggctcagggcaaagactccagcatacacagtgtgtggtgcctccatgactccctggccccctcccctcctcaataacacaagaccctgcagttactcagattgggaggtagtggggagttcttttgatgtcctgcaactggtgggggtgaataaggagcaagtgggaacattcgttaactggtgaagtatttgttgttaatagagaaatgcattgtgaagtcagttcttgtaaccttggtttctttttcttgcttgactagtctttgtgaagggaatggatagagttgattgtactgtaaatctaattgcatgtatgtaatacagagccaaaaaatgtcattttagctgtttggacaaaacgctatagtttaaaagcatattttatttaaaatgattagctgataagagaaatttgaatcagaatacctgaatattatggtcataaaggatggaggaaattattgtttatcttagtactaaatagaataaacgtcagcccctgctacaggtaagtaccacacataagaatgtatgtgttactgtaggagctacattattacataaaatataactgtctaactactggttgatgaaaataataaattggggagctgcatgattaaacacaatgactcatctggttccgcataaagcatttttttttcttattttatattaaaaacaaacgaagtccctttacagggatatgataaaaataagcatctttaagttaaaaatgaaaataaatatattaaacatagtatatgatgtaagttcatgctatgtttcaaaattaagaataatgctttagagtacaaatattaaataactattttatcttgagagggtaaggacttattgacagaatggggtccttctatttgacagaattactaataggtagttctgttttatgtaaaaagtttttgaaagactacctaatgtatttttttaatagatgcatggtaaggtttttagtgtagcaagtgttagagaaataaccatttttgtttgataatttaaaatttaaaatatttataatggaaaagatcattgaacgtattaggcagtgcctaaaaaataacagtggaagccatgaattccttctgtgttactaaaattacactgtgctattttaaatttcactgaaaaataaacatttcagtaatggtatttctatatggtttttacaaagaaaagattatattctgtgatcttttaagatcaagctgtactatgttagagaaacgccactaagctgagaccctcgcagtatgctctcagctcagtgtccatgcctggagaatgtctcttcaacatcgcgtacaccattgtttctagatctttacagaatcttcactgctgctatccccttttaccaagataaagttaaatctccaaagaaccgaatggaggtacttttctcacagtcacccagaaattgtttcctgaatagtttggacctggtactgatcttggctgcttaaagataaaatcagctgagacaaaggaacagtacaaaggcaaagatcaataatgacttgaaaagcattttgaaaactgtatctttgtgttctaaaattttattcagcaaagaaaacaggagtaaagaaagagaagagagagacaaaaaaaatcctagataattatagaaaagaccttgtaaatactaccagagtcaactggaccaaagtgaggacagaataaatgcccttctttcaagtgaaagacgtttggattgcattgataaatatatgcattggatcatttgaaacttcccttaaggcctgtttcacaacattttattgtaaacattttcaatcagaaaagtggaaagaattgtacagtgaacacccatactctcgccttggtttttttttgttgttgtttttgaggctcagtctcgctctattgtccaggctggagtgcagtggcacaatctccacagcggctgaactgatttacactcccaccgacagtatataagcattcccttttctccacagcttctccagtatctgttgttttttgactttttaataatagacattctgactagtgtgagatggcatatcattggaagccagcttactttgtggtgcatttcgaagtgaattggagacataagtagactttactcctaaacatttccgcatgtacattggtatttatgattcttttatttatttatttatttttgaggtagaacgtgcacatactaagatacacggatctacccaaatcttacttaggtgtactcattctatgatttttcacaattgcatctgcctgtgaaacccaaagctttatcgagatatgaacgtattaccctagaaagttcctctgtcgtttcatagtcaatccccaccccctgcaacaatggtttgacttttctccgtagatgaattttgcttctcccagaatttcatatagatgaaaccatgctgcgtatacggtgtttgtgtaaggattccttcattcagcacatagactttcaatctccttttgattcacctaccaagtgggatggggtaagctcattctttggatttcaagtggctcagctgatttggtaaattttcactttcaggcctgtttcctgccattctcaatcttgccagcaatgctcacatcagcaccaatgccacctgtggcgagaaggggccggagatgttctgcaaacttgtggagcatgtgccaggtcggcccgtccgaaacccacagtgccggatctgtgatggcaacagcgcaaaccccagaggcaagtgtcgcgcctttatttctgaaattcccatgggaatgtacactttgtgaaatgaggactgagacttctgttaggaagccataaacattgtgttcaccttcactgctctttgtttccactagcattacggtttagaacttaagaaatttaaagcaacagccgagaggaattcatgttttttattttctttcaacagaacgccatccaatatcacatgccatagatggcaccaataactggtggcaaagtcccagcattcagaatgggagagaatatcactgggtcacaatcactctggacttaagacaggtaggtgagcccagaaccattgaagagtgtctacaggctgctgagctgtggtcttctgatgacctttgggaaagtctggcttctttctgaacacatttacattctaatctcactatttccaccaggtgaaggcaagtggtatacagaaggagtccctggtgccatttcttgtcactttcatcattcccaggtgtcttcagggagatgggtgaaattgcttccatatggttgatgttcttcgaagctgtgtcaacagggcacactcatccatccagggtatcatgtcaggctgtttgctggctgccaacagatgcatggggagggagagggggaaaacacatgtatttcctaacttttagcttactgtcttgctaatgtcattgagtaagttattgtataaggattatataaggctagaagaaaaaaagacaaaacggtgttaaacctcttgactgtgtctcccctgccacatgtagtctgtctgggccaggtaagctggagttgcccaatagtaacttaagcagtgccttcagcatgagtggggagagggaaggtatgactggctccagccacacctgcatctccttaccttgcttcaagtccacataggaggatggagagaaatatgagatgagccccagttgccctgatgttcctgggaaagaaaaacaaaaggagtctgagtggaaggaatgaaaaagagagatggcaggtgttttggagctgttgtcctggttctgttttgagcttttcagaaaagccatcgcattaattcttatttatttccattcagtttctcttgtgttagaactcataagtttcatgtaaaatatgagatcggttaaaagacacaagtaattgtgatgtgcattgtaggatttaaataggaattatagagatttaatgacaatcagaattctttgaataagtgatagttttaaaatgtgcaggaatttttttttattttttatttttattttttattttttgagacaaagtctcactctgtcgtcaggctggagtgcagtggcgcgatctcggcacactgcaacttccgcctccccggttcaagcgattctcctgcctcagcctcccgattagctgggactacaggctcctgtcgccatgcctggttaatttttttgtgtttttagtagacaggatttcactatgttggccaggatggtctcatctcttgacctcgtgatccgcctgccttggcctcccaaagtgctgggattacaggagtgagccaccagacctggccaaatgtgcaggattttaagaagacaaggtgatacttcatatattgatgtacaaggaacttgtgttctgtaataattacagcaaataaggtagcaagatgtgcagctcaggagacattttccaagttcaggttcacagtattatgaaagtaaaataacacttttaatagctttcaggtataagacatgaattaatgtgacactccttaatattttcaaatccccttaaagaaaaagagaaaagagccaggtgcggtggctcacgcctgtaatcccggcactttgggaggccaaggcgggtggatcacgaggtcaggagatcgagaccatcctggctaacacggtgaaaccccgtctttactaaaaatacaaaaaattagctgggcgtggtggcaggcgcctgtagtcccagctactcgggaggctgaggcaggagaatggcgtgaacccaggaggcagaggttgcagtgagccgagatcacaccactgcactccagcctgggcgacagagcgagactctgtctcaaaaaaaataaaataaaataaaataaaataaaaaacaaaaaaaaataaaaagagaaaagagcttctttgaaaagagcttctttgttgttgtgttttgttttttgttttttttttttttttgagacggagtttcactcttattacccaggctggagtgcagtggctggatcttggctcactgcaacctctgcctcccgggttcacgcgattctcctgcctcagcctcctgagtagctgggattacaggagtgtggtctcgaacttctgatctcaggtgatccaccggcctcggcttcccaaagtgccgggattagaggcatgagcaccacgtccagccaagagcttctttttaaccctggcctttgtgtttatctcagtggtaagaatggttctctggaagatttcggtttttcccatcacctttctgacatattttcctttttctaaaggaaaaagtaaaactgtgttcattattaagaatgtgatattatatgagtttggccaaattaagacctggacattttacatatagatttcaaacctctgtaagtctatcctttgtcttgaaatttgtcatgcttgacttcatcctgaagggatggactaagttagtctgaggaattccagaaggcagtctccattttagatgtttaaggcatttttaaaaaataagcatagacagccaggtgcagtggctcatgcctgtaatcccagcactttcggaggctgaggtgggcggatcacgaggtcaggagatcgagaccatcctggctaacacagtgaaatcccgtctctactaaaaaagatacaaaaaaatgagccaggcgtggtggtgggcacctgtagtcccagctactcgggaggctgaggcaggagaatggcgtgaacccaggaggcggagcttgcagtgagccgagactgcaccactgcactccagcctgggcgacagagcgagactccgtctcaaaaaaaaaaaaaaaaaaaagaaaagaacagaaaaaaccatagacatatagttataggctgctttaggtaatttttagtgttttaggatatgcttttaaaataagatcacttaaaataattagtattcagaaatttctttaccatttacacagtataaaaattctgctgtgctttgtttttttttaaacaaagcacattatgcttatatctgatcaagcctttctcagatttatttatttattgagcctttttattacaaacacttttgcatatgtagaaagcatattacagtgaatacacatatacccacccttgagatttggggattttaaaacactggaccatgttcgtttcagtgaattgcagtcatcacaacattttgccagtccttcagtttgtgtcttcaaaaaataaagacgtttgttctgattagataccataccatttcagcctccttgggcaaaattaacagtaatttcttaataactcttttcccatccacattcaattttcccagtttatcaactagtatcttttactgcttttttttttttttaaccaggatccagtaaggaccacttgttgcattggattgctatgcttcttaaatctcttctcatctgaattgtccttcacttaaaaaaaatgctattgaatatatgaatagaccagaccagttgtcctgtagaatatgccacattctggatttgtcagattgtttcttcatggttttatttaacatattcttctgtgctctctatttcctatacaccaaattcagctctagagacctgattagattccagttaagtgtttttcagaagaccacatcaccagccatcctctcacctcacatcaggaggcacccagggctggttgtcccactagtagtggtgctaaatttgaattctctctgggtgttaaaagtcaggtttcttccttgtaatgttacttccttttttctgtcccatatccccattgtttcttagatctcactgacattcagatctacagcatggctacaccttctgatgacttttttttaccttgccaaaatctgcatgtttccttagccattagccaactaccagttgttttctagactatatactccatgagggatgggaccacagctgtcttctacttttctttctctgccctttcctttcctggttagtatttatagagagatgtcttattcacttctgcacacccagacattggcacagttcaggcactgagtcaataattgcattatggatcagtactttttttttttttttaaatggagcctcactctgtcgcccaggctggagtgcattggcgtgatctcggctcactgcaacctctgcctcccaggttcaagagattctcccaccccatcctcccaagtggctgggactacaggcacacaccactgtacccagctatttttgtatttttagtagagacgtggtttcatcatgttgcccaggctggccttgaactcctgacctcaagtgatctgcctgcctcggcctcccaaagtgctggaattaccggcgtaagccaccgcgcccagcctagtgctttctttcttccgttattttttttttgagacggagtttcgctcttgtttcccagactggagggcaatggcgcgatctcggctcactgcaacctccgcctcccagggttcaagcgattctcctgcctcagccttctgagtagctgggattacaggcatgcaccaccatgcccggctaattttgtatttttagtagagacagggtttctccatgttggtcaggctggcctcgaactcccaacctcaggtgacctgcccaccttggcctcccaaaatgccgggatcacaggtgtgagccaccgcgcctgaccttgtgcttttttaaaaattttttttaacttcccccccctcctcttttcttgttcacagtctgaatagaaaagaacaaggaacaaaccttttggctgctttgtttcagtactataaaaatgtaaaatctaaagtatagatttctaaagtaaaattacaggtagaccttagtcttatcaagagttgtaaaacttaatattataaatgtgtttgtgtaacttggtaaatatcagctcttgaggttttatgaccaaattagctgcattctgtgttggcaaatgctaacattgatcctgttcctgattctctaattgatgacagctgtcagaattacagcatttttttttttttttttttttttttttttttttttttgcctctatgtattaggtttggttatctgcaagataaactaaagaaaagattaaaaagtagtcttatcagaagtccataaatgttgtatggtttgcaataaggtttaactactgtttattttagtaatgtattacaagaggaataatgagatttacttctttgctttttaaaaataatgtctactattcacttctttcattgattcacagtattttagaagatacactgtcagatatctagcagtatcttacttttaaaaaattcataggaatttcatgtgtgtgatatttttaagaaaagtaaagcataataatcatcaactttaacaaatacaaaattaacatatatgttgtggtctccattaataaaatgctgctcaccaagtggtttaggatctcatatatcaatactaccactgaacagtgatcttttttgacaacttaaaatttaagagaaattattctgaaagagcatgcacatttcatgaatcttgcatttataattgtccaaaatcctataggttccacgaattacaggaaaatttattccctatggtagcatttctcagtagaagaacatgaagatttcctgtttgagaaccactattttaaaagttaatacactgttgagatgaaaagatgttcatcgtcattattcaatagggaagtgaaaatcaaaccacaataagataccccttcacacccattaggattgctatattgaaagagttggaaaataataagtgttggtgaggatgtgaagaaaatggaaccctgtgcactgtgggtggaaatgtaaaatggcacagtgttatgaaaaacagtgtggttgttctggccgggcgtggtggctcatgtctgtaatcccagcactttgggaggccgaggaggtcagatcacgaggtcaggagattgagaccatctcggccaacatggtgaaaccctgtctctactaaaatacaaaaaattagccgggcgtggtggccaatgcctataatcccagctacttgggaggctgaggcaggggaatagcttgaacccgggaggtggaggttgcagtgagctgagatcacgccactgcactccagcctggcgacagagcaagactccttctcataaacacacacacacacacacacacacacaaccagtatggttgttcctcagaaataaacatagaattacagcaattccactactagggaatgccgtaaagaatttaaagtagggactcaaacagatgccagtgttcagagcagcattattcacagtagccaggaggtggaagcaacccagatgtccatcaaccatcaacaggtgaatggatagtcaaaacatggtatgtgcatacagtagaatcttagccttaaaaaggaatgaaattttgacacataccacagcatgtatgtaccctggaaacattacgctaaatgaaataagccacacacaaaagaagaaatattatatgaatcaatttggatgaagtacctggagaagtcagttcatagagacagaaagtggagcggggtggttgccaggagctgggaggagagagaatggggagttgttgtttaatgggtgcacagtttaggttcggaagttctggagatagatggtagtgatcattgcacaacagtgtgaatatacttaatgccactgaattctacacttaaacatggctaaagtcgtggtttttatgttacgtatatttttctacaacttaaaaaagttaatacactgtgaaatatttggtgtattatgtcagccagggtcagtcaggaatatggaagccacaccagtcatttaaaggcacaaatttagtgtgaggaattggtttgacagtgtgggagagctgggagagggagcaggaaggtaacttgggggtagtagtggtggaggaggcagcaacgcaggagggtgtggttatagcacctagagcctgggaagagagtctcctatctttcagaatgctcttctgggggtcctggaaagctggaggctggagtcagctgctacagcccaaggcagagggccgctgctgggcaaggctgataggacccggaagtagacatgggagaagtcctgcctccctccagccctccagcctcccactagtgtcgccgtcagggagcatcgatttgcagcgtcccagcctcagcatccaaagctgggctggcaggtgcttagcaaccagcgcaaacacttcttctcagtaggtggtcacttgcaccagtataccaacagaaacacagagacagagcagccctcgacatcctggggcaggattttgttattatggtggtcagccacatcctaaatatgctcatattaagttttttagaataactttggaatgaaaatgcaaattttagaattctcctggagaaatcatggactgctgtctaatacattacaaactaggtattcttggttctcagccgagagactgcatcagggcaccagcttggtcctgggaccttcaggacagggatggaggaaatacagaagcagttccatttatgtattaactattgggttttggtggtgtgatgtggtggagatgcatgaagtgtggtagggtgatatatacaaagtgaaatgtgatagcttgaaggatgtagagtacctaacaaactcctcacatttaataaacatgagttttctttccctctgtcatatttctaatacacaaattactttaggttcccaaagatcttcagatatcaccaagggaaatgttaaaccaggccttaatagaatctaattacagttagctaacaggattaaggagtgcagttatgcagattttgagaaattcataagtcaataattattctgttttttctgattaggaaattaagatggaatcatcatagaaaaatggaagataagataagtgtaaacaggcagaaacacatcatctcttcgctctgtaacaatcgctaattgatcccttgggatatttactttgtcatttgcctacaattctatgcatttaataatgctacaacaatactatcatgtattacatacttactgtgccagacattgtgctatgcacttgatcaggattatgtcattgaattctcataatcgcctgtgacttggctcctgttattatccccttttgacagatgacgaaactgagacttagagagtttaagaggcttgctcaagggtaggactcactgaagcttaagagcctgagctctgcatcattgcaccactctgaccctccagctgagacagattatgtgatatataaatttgtgttctaatgttttatgtaattgtatagcatgaacatttcccagtataactgaaactcatgattaataattgttaaagctgcattaatagtttctatatggcttacgcatcatttgcctaagaatcctcaggcctgacattttggtgctttttctgttatgggtaataacttgagctttcagtgaaaaaaggttcatttcgtatgtataccaatgaagtaatacagtgagtatcaatcatgtttgaggtttatatgacaaatttatggttaattttgttttgagcatcttttgaaagaggaatgttattaacaggtacatatataggaatttatagatatgggttatagcatttttttcctcgtccatgttatttcatctgcttttcccagcagttctggaatgcgagtgatcgcctctttgcaggtacaaaaatcacggcacagagtaagcaggtcacaggcttgcccagagtctacggctgcaggtgctcaagctaggcctggaaaccaggacctctggttccctctacaccatgccacgctgtctccttgtctttggtctccaattattgttttcctttgttctgactttatggggagactggcaagagctcttgcaattccctcttgatgttgggagtgttcagattctagccctttccctcttgttctgtttgcctgctcagtagggtcctctcccctatgaatccagcagggtattgacacttccttcatgcttttgcagtggctgatagaattgggtgctacctaacgtgtttttttttttttttttgatcaagaagcaggaaaataaatcagttatctcctattttccttaaaaaacttttaaagccggagaacatttcagtgggagtgagggtcagatttgtgagtaaaaatgtataatagtcttttagaagataagatctgttttgtaaaaaagggaagttccctatggcattgaaaataaagctgccttttggagcagtgctttattttatgtgtaggtttaattaggaagtagcactttgttgtgggaacataatcacagaggagcctttgttttatgcaaacttttagacaagagctgcttgtgtgctgggttttgtaaaacctcattaattcagatgtcagttgttttttcccccaaatttctgaaaaattgaccagtattgagtgaggtttattattatatcattcaaatataaagtatttattaagcacatcgacaaggtcaacaagaaaatagggaaatttcacattcttaagataaaatctttaaagatttttattgcaagaattgcatctaaattggagcgtctcattacaagtgaattttggctgttcctggaaagagattaggcagaaacccttcctagaagcactcagatagaaattacttttactgtatgctttttgtactctaatgattctattccagttttctattacttcatactggcctccaccaatttcaaatattaaggtttcttgaatttgcttggtaaaataaatagattggaagaaatcttaagctcatcattatgatttggaagtaagccaccctaaattcctgtccttcagacatttttatctgtgttgtcatgttctctgtgaagctactagactcagaaataggtctttcttttgttttcacattttcattatctcgttttattttctcatgcatagcttctctgctggttatctattgtgtaagaaatcactgtgaaactttatggcttaaaacagcaacattcattttatacctttcctgatttcagtggggtcaggatttaggaaaggcctgagtgggtatgtctaaggctgcagaccatggggggctagacttggagcagcttaggggagaggttctctggggcagctggaggagggggtttggggcagctggggaagagggtgccagaccagctgggagaaggttcctggggcagctggaggctatgttcatgagagttcagggcgtctccgtgtggtctttccacatgggtgcctgagcttcctcacagcatggcgactttaaggcagcttgcttatagggcagcttggggcaggaggcagaagttgtgtcccctcttagacctggtctccagtcacacagtgccagtttccctgtgctgtatgagccacccagtcactcaggttggcagagattcaacttgggaaagatagaccagcctcacccgtcaaccggaggaggggtgaagaatttgaggcctgttttaaaactgctactgcatcagccttctgaaagggtctttctctaggaggctttaatctttgcagccttgcatatcttatcttgtaggggccgcacccctgtctttaggtgaggtgaagagcttataggaaccaaacaggaatgcacatactgttcttttaacgataagtgagctgaataagtgaaaacaatggaggctaggctttaggaacaagatggagtttttgtttcttgatacgatttatatttaagctttctcgcttacatattatcggtggggattgccaaacagtccaggataaccattttgccatttggcagagctcagttctctttagattttgagctgccaaggtttggctgcactatttcagtgtttctacccagcagggcttcctgcatttggcctgggaggattcagggaaatccgtgaagacagttttgcaggattggatcacaaaatgcttttcatatccccaactgttttggcatcaaagtaaagatttttgtatatttatgggaaaaaagggaagtccgttctgaaattatttcttccattatattgaagctgaaaaaaaggggtaagttttaatttctcaagagatatttctttgaaaaatatagtgcagtttggtatccattctagctttttttttttcttttttatgtattgacttaacttctactcagattgtagtatttccatctttaaaaacaaagctgtaacaacgtttttaaaacatggcttataaaaacctcagctaggtctcagaatatctcttgtgtttttaatgtcttcagtggaccttttctctacacagaacttcctttattttgatgtactagtaacagataatagcagaaagtttttaaactatagaaaaatataagaaaaaagttatttaaaaaatcccctgtgattcttacaatcaggggtgaccttttgctccattgcatcatatctaagaacactgaatatatttaagaaatcagggaatctctgtcttgtgcatactgggatctcaggattcatcgatgaacaagacaacgatcggattcacattaagcccttagtgcaaagaaagtggacaacacatgggcggttccttcagtatgttggttattagcagtgatgagcaggctcgctttcattgcatctttaaaggcaggccccagctctcaaggggcttctggtctggtggggaaaaataggcttctgctgagtggtgtagagtgtgcagggaccgggggtgcacagagaacacttcagaaggaccacttcgtggctcagagaaacaatgcaggccgggcgcggtggctcacgcctgtaatcccagcactttgggaagccgaggcaggtggattacctgaggtcaggagatcaagaccagcctgaccaacatggacaaactctgtctctactaaaaatacaaaattagccaggcatggtggtgcatgcctgtaatgccacctactcaggaggctgagccaggagaatcgcttgaacccagggggcagagtttgcagtgagccaagatcgtgccattgcactccagccggggcaacaagagcaaaacgccgtctcaaaaaaaaaaaaatgcgaaaaggacccaccggaggaagggaggcaggaatacagaaggaagaagcagcagggaagagcagggtgggaaaggcctggaaattagaaagcctggcatgtctgtggagctgacatagtacattcagtcctagaataaacatttcctctcgtttttcttttctatttattgggacataattgacatatagtgaaatgcacaaatctcgagtgtatagttgggtgagttttgataaatacagacacttgtataagccattcccttggtatagaacgtttgcgtcaccccaaaaggctcccccacccccttcccagccaattccccacttgctctcctccctcccagcagccagaggaaccgctgtcctgaattttttttttttttcactttggaagagttttgcctgtgagatgacttcttattaatggaatcacagtgcgtccttttttgtgtctggcttctttctgtgagcatgaggtttgtcagattcacatgccattgcttgtatgagtggcttgttccattcatttctgtgtagtaatttcactttatggatatagcaacatttatttatccactgtcttgctgggtatttccagtttttgtctattgtaaaaatgctgctgaaagcaaagcaatcctgggctcttctcccaggagtcactgtcccgtgctgcctgctgtccaatatttgaaacccattgtttatatcctgtgtccagagttctagctgttcactggaggagagccaggtgctaccaatttcttcttcctagcgaccagcaaaatgcctgtaataatttttaatggaagaatgatattttatcatttggctacacaataattcatttaacctgttcccattgggagacacttaaggtgtttccaatttggggctattctaagttatgctgcaacaaacatttgaatattttatggctgttacggtagtttattttttagtgtcgattccaaaaaattagattatttggttaaatgcttaaattttttaaaatgtgatctttattgccttatttttttcaaaaacattgctcaatttatatgctcagtaacagtgataaagtgtgtttcacaattccttggtagtatagagatcagaattttcttttcttttcttttttgtcctatgctaattgaatagcagagaatttatttgtttataatgagttgtcacattatgtcactgtactggacatatctttgggaggactaagctaaattcagatgcttaaacaatgtttggtctgatttattatcttcacatgtgtaaattttatgattattaatctattgaggcagtcaaattgctataacacggtggtgacatttttagatattgaatatcaatattagaggctggacagacttttcaagtcatattctaaccaaagagaaagaaccgatttgactctaagtctcattattttgagaagttccagttgtcacaagaataactatggaacattggaatattgattaaaaatctgataccttacctctgtattgtgcattttataaagtgctttcctgttcattatttcatcttatgcttacatgaaaaatctgaaaaatgtgtcgatttgtatccacgtcattcacgaatatgcactgggatgtagagaatacatcctctggatttgtcgttttaagcctaaatcatggaaaacattcaatgtagttttaaagttctctaggctataggaaattaaaaatatattactcacctatcactacctttttccaggggaatatgggtgattgtggaattctgactctgaaagcattggttttggtgagatgaccaggctgccaaagtgcactgaaggtagagacttcttagtgactgggacagctgcctgttgatgccgtgcacctcctcagacctgtggtctctttgcaatttgtatgcaggcacttagaaagcactgactcgctctggcctgactgtttcggaaatgaagctaggaaaactgtgaggtcaaatttaaacctgcaaataattagctggatggcatagctgtacaaactgagatagcccgggaaatttggtaaagctttaaaactattatacttattcgcttctgttcagccaactgggctgatttttgagacagagtctcactctgtcacccaagctggagtgcaacggtgcgatctcagctcactgcaatctctgcctcctccgttccagccattcttgtgcttcggcatcccgagtagctgggactacaggtgcgtgccaccacacctggctaatttttgaatttttagtagagatgaggttttgccatgctgcccaggctggtctcgaactcctggcctcaagtgataagtgattcacctaccttggcctcccaaagtgctgggattacaggtgtgagccaccatacctggccaacataagctttcttatcagttgagaattactagaatatgtgtaattgttttcttgttttaaaaaataatagactattttttagagaagttttaggtttacagaaaaattgaatgtaaagtacagagaattcccccacacccctctgtacaatagtttttggatcaaattttggctagtcgttgtttttttttttttttttttttgagatagagtctcactctgtcacccaggctggagtgcagtggcgcaatctcagctcactgcaacctccgcctctcgagttcaagtgattctcctgcctcagcctcctgagtagctgggactacaggcacgtgccactatgcctggctaattttttgtatttttagtagagacgaggattcaccctgttagccaggatggtcttgatctcctgaccttgtgatccacctgcccccctcccaaagtgctgggattacaggcgtgagccactgcgcccggccttggctattcttaatcacccttttaagagcaagtgactgatccagtgcagttcaacagtttctaagaccttttcctccgtagtatttacaagacgatcatgagaattgtcaatcatataatttaagaatttttgcttttcctactatttaatggtatgtaatcagaagatatttatctgtgttcttcatatgaaggaagcacaaaaaaatgtcagttaaataaccacttagtaggtctctagtgggatgaacaatatttagaatcatttacaactttataccagtcttgtatcagtcttatagactgagccaggcaagaaatggggctgcccgaacttgctgttcaggaaatgccaccaaggagaaagcattgtgtgaacaatgggtctttcactgtaaagtcctgagtttggggctctggttttgtattttgtgaagtatcatcatgccttgccagagctcagtaagaatgtgaccgaaatcaggtcatgagaaagataagatttcaaacatcccctcggagctgtttgcttgacctccactgacttaattggtttctatggagttggcccctgcctagaaatactacattcctactcattttcaacttagacagctcagtctttcacaaggttgaatcttcataccattcacttttcatctctttttttttggagggggtgttattataaaatatgcatatcataaaatttaccattgtaacctttttttgtattaaaaatggcatattctctattttgcatactttaatttcagaacaaaataaacaaaaaaaaatccacaatacacaacatccaatcctgctgtcagagtagggagggaatgggggcttgacacccttgtttcctgccttcaatacaaagacaggagagaaaaaaacactagacatcagcagggggagccaggtgggacaggggcacttgaggctgcagtgggagccattttaaccatttttaagtgtacagtacagtggcattaagtatattgtgcaaccgtcaccaccatccatccccagaactttttcatcttcccaaacagaaactctgtaccccttaaacaccaactccacgttcctctcttcccccagccctgggtagcctccattcagcttttgtctatgaatttgattactctgggtaatcaagcttacataagtggaatcatattctatttgtccttttgtctggcttatttcacttagcgtacataatgtcctcaaggcttatctatgttgtagcatgtattacaatttccttccttttaaagactgaataatattccattgtatgcatagaccatattttgtttagccattcatccatcaacgggtacctgggctgtttccaccttttagctattgtgaataatgctgctgtgaacattggtgtacatgtgtattcgagtccctgctttctcttcttctggatatatacctggaagaggaatttctgcatcatgttgtaattctatgtttaattttttgagggaccaccatactgttttccatagtacctgcaccattttacattcccactgcatcttttaaaaaaataaacaaaagccttcctatatattatgtatcctacatatttggatattctcttttaaaaaataagctttaaatattatgatttgtcagttagatactcagtgaagttagatgtgtctaaagaaaaaggagaatcttcaagtagaatatagaccaaggatccatataaaaagtgaaattttacacactcacaagaaacaatactttctcatctctctagtgctaaaactatcaacgattcagctagatttagggcccaaaggaaagaaaacacataattattgtttctgggtgttgtaaatgtataactaataggttaatgtttaatggagttcgttaagtacagatttgcacagcttttctgggcagtatcacctgttggattttagaggcttaatgattaagggccccttttactgtcactgagtgtgatgctcgtgtgttttctcataataaggcatgcgaagaagggatgcaagctgtaagctcttcaccatcgctccatcaactggagcaaaaacaggtcaatgtgaggactaggagaagaggtgaaaagaagttgaatttttagccagatattctctgggactgaggcaagagcggggaagtgtgggctttggggccatgtaggagagaactctgcactcttcctacagtggagagagggatctgatcgagctggaagacactgcttggcctctttgtgttttccttctcactcatgttttggccttttagaaaaccctgtaagacccgttgcttttatctctgctctggtctcttggtgtttacaaagtcagcaccaccatctctcatgatttccaggcaccaacatccaatcctgtgaccttcagctccggtgaccctgtagctccttggtttcagtccctgggatggtctaagcgttttaaccacggtgcacaaacatctgcgtgatggccgacagccctggccaggcgcccgccggctctctcctgccatctctgcactccttcctctgtgctctgccctcagagttcccctcagtgtctttcctcacctttgctccagttacctggacatctctcatctggtttcagagataccttctcttaccttcagggaagacttccctgactatctgccttctccagagttaatgggccttcccccaacacccagacactctcacagcctccacccttctccctggtgacttggtcagcctctggctttcccaccagggcattgggtcacatagaccttccatccactgccatatttgtggcacctggcttagtccctgtgacaaagcagatgctcagttaatgatgactggacgaagcttcagtgaaaaattgttagtgggcgtcccttgtccccagtgtcctgtgtccatgtggagtgttcctttgctcacccctcccccacctgtcctcaagggaggagcagtcattgcctaactcggggacagctgactctctcccccagggcacagtgtgctcttcttttcccgtgcaggctgttctcagacgcacaggtactggcccacaggacagagcttccagggtgggtccacaagcacccactcaggctgtgatgcaggagggagtgtgtcgagcaggcctccaccgcgcccatctacatcatatcctccagttttgcttttttatggaatattgcagactgctttttccaatctccatgacagatttgtgagcctacttccacatcagaagaggaaggaagggatgccattcattgccaccactgtcccaacatgaacaaatggggaactgcattttggagaaagcctagtgtgatttcaaaggcttagatggtcctaggtgaaaacttgatagttaacggccaagggaatcgttaggagttggggaatagaaaaggtgctttttggatttcttaggtctgagaatggcctgtaactgcatttcacaagtgggtttatatcattctaggggcacttggctgtcatgtggatcttacaaggtggggaaaagaaatgaagatcctcacaaagagcatttggtgacatgcctggctgtggttttgaggctgttccagctaattttccacaaatttagcaaaatcaccaagaacacctcgtcaacttgagcaacaggaacaattatagggagaaatacatcgagactaggaagggaagacaaccttttacttgtctgttctgtttcttagataaagcagttcaacactttttgtgggggatgagggacagggtcttgctctgtcatccaggctggagtgcagtggcaccatcacggctcactgcagcctcgacctcccaggctcaagtgatcctcccacttcagcctctccatggctgggaccaaaggcatgcaccaccatgcctgcatgattttttttgtagtttttgcagagatgaggttttgccgtgttgcccaggctggtctcaaatttctgggctcaagcagtctgcccaccttggcctcccaaagtgctgggattacaggcatgagccaccacccccagcctgcacactttttaaaacaacaatactattagtcaccctcaaatggaaatggtgacacctggaccgtgggtcagcttgcggggtgggctccttttgaaatcgcttttctaattgatggaagtcagaactgcttctgacaggtgtttgaagtatttctttcctatcttcagattaccgatcatgggttactatttacgttttaaatgggctcgtatctctgtgccctctatttgtcagcaatcatctctcttactttggcttttcttcaatgtccactttaagtatctcagcatggttctgaagggagcattcctagattgtctgagacatgaattttaagaattttaaggaaagaaatctgcttgatctaaatttatcactattggcagcctgtccctcctcccctaatcaaaacaaaaagcaaaaagaaaaggagcaaaaaagagaaaagttactggacaaggacatattttgttttgttttaattttgggacatgtttattttgcacatctaatggtagcaccaaatttaaagagaaacaaatcacgttttattctgaaatgttcttctcgtttatgaagctgtttctttttgtctgttgagtatgctgctcctaaaatgagataacagttaaaactgccaactgaaatataatataaatgacatttcaagtaattgctctgagaaatgtatttaaaatgtgtattgcagacatccttccttccctctcagctccctagcatctcagtttttgctagtttttgttgccacttcacgtgctgataattgactaagtgctttcgtgattgacacgctataaaactggaagtgagccatatctgcattggtaattagcctcctattaaatcactgcttctttattcatgagtagtaagtgttaattcaaatggtcattttacatttcattctctaataatttcatgagacataaatctcacagagcacaaaatcgccactttcacagggataactcagcaatattatttatcaaatgcacttaactgttcatctaaatctcttttgtctgggaaaagtttatttccttcatgcaagagagaaaacatgccttcattcactgttcagttaccaccgtggaggcaggtaggttcttttatggagaattttcagaccggagtcatgcctggtattgagccccatagatttcctgagagcctgcggagaacagctgcactttctgtggagaggagaggcttcacttctgtctgcacatgggaagttgacctctgatgctggaaaattaggttatctgtattttttagacatctgtgcctgagatggatttaatatatttaagttaagattgaggcccacatgaacattcctgtctggattccttttcagaaagtggcgtttgatgtgtgcctactttatttatgtgacactgtttatgtgcattccagtgatcattaacaaaggctacttggtggaaaatcgtgatgaaagtggatttaaaaatggctgtatcagctgcaggtttagcaagactacattgactctgagtctagtgagaacccctgcatcatcaatttgtgttcagccaaccttaaatccagagaaaaggcagtttagtcaaccatgcaaaaaaagggcaaaagaaatattgtggactttattgggacaagggtttaatattctatatactggccaggcacagtggctcatgcctgtaatcccagcactttgggaggccgaggcaggtggatcacctgaggttaggagttcgagaccatcctggccaatgtggtgaaacctcgtctctactaaaaatacaaaaattagttgggcatggtggcaggtgcctgtaatcccagctacttgggaggctgaggcaggagaatcgcttgaacccaggaggcagaggttgcagtgagtcgagattgtgccattgcactccagcctgggcaacaagagagaaactttgtctcaaaaagaaaaaaaaaatctacatactaacagacagtccttcagtttttctacattacatataagaccaatttgtcaacacatgattggtgaattcggcctgtattaatcaggtgagactgctgtaacaagtagcaccaactggacagcttaagcaagagacattaatgtcctcacagttctggaggctgaagtctaaggtcaaggtgtcagcagagtcggtttcttctggctcatagtggcttcttctccctgagtcctcacatggtcttccctctgtactgtctgtgtcctaatctgcttttcttatgacaccagaaatattcaaatagggcccactacaatgccctcatttaacttaatcacctctttaaagagcctatcgccagatacagccatattctgagctactggaagttagaacttcaatgtatgacttttgcgggaaacagttcagcccataacagggcaaagtgaagacaaattgtatttaggttcttcatagcaccctttgcctgtttatcagacttaccactctcaggacccctagtttgtttcctggtctccagtttggggaccttgaggactattgagagattgtgggaacaatggcccagcatcctaaggaagtctttgatcaagataaaagttaagtaactcctcccttgagagcttgtcctgaagtttttcactacggctgttcttccatttagtatcattttcttatatatgactaagctctcagaataaaagctggcaaaaggttggtaaaatactggaacatggtattgaaataattatgggctgggccaggcgcggaggctcatgcctgtaatcctagcactttgggaggctgagacgggtggatcacaaggtcaggagttcaagaccagcctagccaagttggtgaaaccctgtctctactaaaaaaaaaaaattaaaaaaaattggccggacgtggtggcaagtgcctataatcccagctactcgggaggctgaggcaggagaaccgcttgagcccaggaggtggaggttgcagtgagcggagatcgcaccactgcactccaacctgggcaacagagtgagactctatctcaaaaaaaaaaaaaagaaagaaagaaagaattttgggctggatgcggtggttcacatctgtaatcacggcagtttgggaggccaaggcgggtggatcacttgagcccaagagttcaagaccagcctgggcaatatagtgagaccccgtgactatgaagaaaattgaaaaaaatcagccaggcatggtgtggcttgtctgtggttccagagatttgggaggctgaggtaggagaatctcttgagcccaggaggtcaaggctgtagtgagctgtgaccacgccattgcactccagcctgggtgatagagtgagatcctatctcaaaaaaaaaaaaaaaaaaaaagaaaagaaaagaaaagaaagaaagaaatgacactggttaaagtgaaagggtggaaaaactggattagggcttatccgttgtctcagcctgggatttctttccttttctttgcaatatatagaagtagtgcagcatagtgcttaagagtacaaactgcctgggttcaatccctgctgtatacagtttagcacctgtgagatcctgggaagattacctaacctttctgtgccccaatttcctcatctgtaatggggggaaatgacagtacttactttgtaagaagaatgttgttgtaagaattcagagttgttggggcatggtgcctcatgtctttaatcccagcagtttgagaggcatggatcatttgaggtcaggagtttcagaccagcctggccaatatggtaaaacctcatctctactaaaaatacaaaaattagctggacatggtggcgtgcaccagtaatcccagctactccggaggctgaggcaggagaatcacttgaacccaagaggcggaggttgcagtgagccaagatcatgccactgcactccagtctgggagacagagcgagacactgtctcaaaaaaaaaaaaaaattcaaagcgttaacaatcctaatgaagcacgtggtattggtactggccacagtaagtgcttcgtggcattagcattcattaatctttgtttcttgcacactctccatcgtgttcccccacctaacagaataactggaagagctgccactatgcttaacatatgaacccggtctccaggtgaatgtaggaatctttttgtttgtttgtttcttggcattacaaaaatgaaagttcagtgaccctaggtgtgtgtggacatttgggggcaggcagcacgcagggtggctgaagggctctggagttgacaccacctggtttcttttgggacctgcaactcagtagtttgtttcttgacctctctcttcatcagtttccaaatgtgtaaaatgggcacaaaaacaataatggggttgtttgggattaaatgtgatgatatatgtataaagctcttaacacgcacgtggtaaacttgttagttctttccatattcaagtgtgaaactggaagacaaagtaattacattctgtttcagatgtctttgtaaatgaccttgccttctctccctccccaatgggctgcctgatcaccctggctcatgtggcgcctctgctttgtgaagtcaagtttcacaggtgcagcagtaatggatggtcacaacccacatattgagttcaacttttatgatgcaaacatttacaaaacagttggacagtgatgagtagctatgaggatgttctccgttgtcctccttgtcaaagccccgaacacattatttcacttctgtttttttttttttggagacagtctcacactgtcgcccaggctgaagtgcagtggtgcaagctccactcactgcaagctctgcctcccgggttcacgccattctcctgcctcagcttctcgagtagctgggactacaggcgtccgccaccacgcccagctaattttttgtattttagtggagacggggtttcactgtgttagccaggatggtctcgatctcctgacctcgtgatccgcccgcctcggcctcccaaaatgctgggattacaggtgcgagccaccacgcccaggccttatttcgcttctaatgtgctttagaaacagccattgtcttcgaaaggaaagtagctcatgctcagagatagccaaaacatctgacacactgaaatcactcgcagactgaagtcgattggagaatgtttctggcaggtggaaagagtgactataatgagatagaattgttagtccttattgattctgtggaattccagaatcagggaaaagaaaaacaaagaaataaaacccaagaaaatccaggcaataagactcagtaaattaacaacttccttcccaagacatacacatatatgtgtatgtgtgtgtacgtgggtaaattttttttttttttttttttttttgagacggagtttcactctgtcacccaggctgggagtgcagtggtgcgatcttggctcactgcaacctctgcctcccgggttcaagcaattttctggcctcagcctcccaattagctgggattacaggcatgtgccactacacccagctaatttttgtatttttttagtagagatggggtttcaccatgttggccaggctggtctcgaactcctgacctcgagtgatctgcccgcctcggcctcctaaagtgctgggattccaggcatgagccaccgctcctggcctaaatttttatatatacatatatatatttacacacacacacacacacacacacacagctgacccttgaataacttgagggttgggagtgccaactcccaaggcagtcaaaaaatccatgaataacatttgacttccgtaaaagacttaactactaatagcctattattgacttgaagccttgctgataacataaacagttaccacatattttatgtgttgtatgtattgtattatgtattatatatgtatttatgtgttgtatgtttatggtatattcttaaagtaagctagagaaaagaaattgttattaaaattgtaaggaagagacaatactatatttactattcattaagtggacgtggatccatcaaggtcctcatccttgtcatcttcacattgagtaggctgaggaggaggaggaagaggggttggttttgctgtctcaggggtggcagaagcacacaaaaaaattagtttataagtggacctatgtagtttaaacccgtgttgttcaagggtcaactgtacacacacacacgtttagaggtccatttacacacatgtattgcatggctattttacaaattaaaagtactggactttggtttttaaacaaatcacccatatccatccaggttagaggaagtctgcagtcagtagcagttcacctggagaaaggcatttttgttttttgttgcttgctaccccaacctgagttagtaatctaagtttactgtcagaaaagtgaatgcttgctaaggctgaataactaaaacaggggtgtgatattttcactacgttcttgacaattcagaaaacatttagagttctctattcaattcctgggagctgcattttaaaataaagttgtgtccagagccttatgacaaggcaaggatgtcttgttaaatgatgaatgttttcaggaaaccagaatactgaggataaaaacgagagattctggaggtgatatatgatagttatgttcagatacttgaaggacagttacatgaaagtggaatccaagatcttttctgcagctccagcatgtcgaatattatgggggagcttgaatcaatgtaaaaaaaagattatctggccaggcatggtggctcaaggctgtaatccaagcactttgggaggtcaaggtgggcagaccacttgagcccaggagtttgagaccagcctaggcaacatagtgagaccctgtcacacaaaaaaatacaaagattagccaggtgtggtgctgcatgccactctggaggccgaggtgggaggatcacttgagcccaggaggttgggactgccgtgagctgatatcgtgccattgcactccagcagcctgggcaacagagtgagaccttgtctcaaaaaaaaaaaaaaaaaatcctctaatgagggagttgtcataaaacaaaaggactgtcttaggagctaatgaatttcctgtcactggaagtacttgcagaaggcctggggtttttggagaggtaattccttctcagttttagattttgggctagatatctaccagggtcccttccaaatccaggatttgtctggctagtttcctcccgctgctaatagtcatctacattcatttttttttccccccagtttgtttcctcattactctggcttttaatttttttcaattaatagacatttttggaacagttttcagtttgtagaaaaatgagcagaaagtacgaagttccatactcctcactctctcccttccctccagttgctcccactattaccatgttgcattagaatggtacatttgttatcattgatgagacaatattgatgcattattattgttgagtccatagtttacctgagggttccctcttggtgttgtacattctgtgtgtttagacaaatgtgtaatgacaagttcccaccattagagtatcatacagggtggtttcaccgccctaaaaatctcctgtgccccacctattcatccctccttccctcaccctgagacgctggcagccactgatctttttgctgtcttcatagttttgcctttgacacagtgtcatacagttggaatcatatagtatgtagccttttcagattggcttctttcacttagtaatatgcatttgtttgtttatttatttatttattatttttgagacagagtcttgctctgttgcccaggctggagtgcagtggcacgatctcggctcactacaacctccgcctcctgggttcaagcgattctcctgcctcagcctcccgagtagtcggactacaggcatgcaccaccatacctggataatttttttgtagttttagtagagatggggtttcactgtattagccaggatggtctcgatctcctgacctcatgattcactctcagtctcccaaagtgctgggattacaggcgtgagccaccatgcccagtctatctatttattttttgagacagtttctctcttgttgcccaggctggagtgcaatggttcagtctcagctcactgcaacctctgactcccaggttcaagtgattctcctgcctcagcctcaaaagtagctgggattacatgcatgcgcctccacggccggctaatttttttgtatttagtagaggtgtggtttcaccgtgttggtcaggctggtctcgaactcctgacctcagctgatctgcctgcctcggcctcccaaagtgctgggattacaggtgtgagccatggtgcccagccatttttttttttttgatacagagtctcactctgtagcccaagctggagtgcagtggtgcaatctcagctccctgtaacctctgcttctggggctcaagtgattctcgtgactcagcctcctgagtagtggggactacaggcgcctgccaccacacgcagctaatttttttgtattttagtagagatgggattttaccatgttgcccctgggtgttctcaaactcctgggctcaggcgatccaccagctttggcctcccaaagtgctgggattacagacatgaaccactgaacccggccagtaatatgcattcgaggtttcttcgtgtctttttgtggcttgagaattcatttctttttatcataatattccatggtctgcatgcaccatagcgtgtgtttctatttacctattaaaggacatcttggttgcttccaagttttggcaatggtggtgcaagttttcctgtggacctaagttttcagttcatttggttgaattcccaggagcatgattgctgagtatggtgagcatttttattactgagaatggtgagcatgtttagttttgtaagaaactgccaaactattttccaaagaggctgtacctttttacattcacaccagaaatgaatgagagttcctgttgctccacatcctccccagcatttggtgttgtcagtgttttggattttagccattctgtagatgtgtagtgggctgacttttttctcaattttagatgtgttatctccaaatcactatgaaaaatacttttaacactactattaatgtaacataacactagtatctttcaagatccaaataaagacattggaaacaagaacaagctcttatgttcatatcaatattgttaataataataatactacatatttatttgtgagtactttttgagttcattctgaaaacaaatgctactaggagattattcacaagacacatttctgattaacatgtatgagcagttatactccaaagcttcgattttggcaaccaatgtataccagttctctcaaggtgcacttttgtttttgaacagttgctactgattctattttttaaaaaaattattgtgtatatttaaggtgtacaacttgatttgatatacatatgcaatgtgaaagaatcatcacaatccagataattaatatatttatcacttcacatagttacccttttgtgtatatgatgagcatacttaagatctacccttttaataaataaatttctagtatacagtacactattgttaccatccattatatctccagaacttattcatcttgcataactgaaacttggtatgcattaaccaccatctccctattcccctctcctcgcacctcatggcagccaccattctactgtctgattctaagttcaactatcttagattctacctttaagttagatcatgcagtagctctcattctgtgcctggcttgtattgattctggattgagacttttcagtgtctttgtttcaggtctttcaagttgcatatgtcatcattaaagctgccaatgcccctcgacctggaaactggattttggagcgttctctggatggcaccacgttcagcccctggcagtattatgcagtcagcgactcagagtgtttgtctcgttacaatataactccaagacgagggccacccacctacagggctgatgatgaagtgatctgcacctcctattattccagattggtgccacttgagcatggagaggtaggtatggtgcccgctgcagcaagatctgtttcctcatcagagtctccctgtctcagactcaaaattgatctctctcaatacaaagatctttaatataactatctagctctatttaaagtggccttgagtcatgtctattataagtaatttcacaaacaatatggtttaccttgttgacttcctctcttcaaggaggctctcagtcttcactctgctgtgatttaataacgcccttggatcctccttcagagcatcttccccacagcaccagggcaagaatgtttgttgaaatattagagagctaaaatgtcccccaaagttgtagttcccttttctcagtgttctcctcggtaggtggtgagcactggagactcttgaagtcttgcagcttagtgcccaacatgcccagattgtatacacttccttgaagtcagagtataatgagaaacagcccattctttagtagcacctggcttgatgagatgaaactacaaaaattctccagtgctcttcacagcgggaactctgcagcgagctgtgagttgtttcaagggcagagattaattaagacagcctgtatcattcaggctttgtggactttttctttgttcttctcgaagcctattcataacattttaaatttgcttcagagaagttgtagcccagggacagatgctgaaatattctaaccacttggagagaaacggtcttcttaaaagattttcagcaataatgccataatgtgatgaatgccgtagtctttgttcttcacattgtagtctggttccacatctgatctttggcaagtgagggttttcttttatatcaaattttaaagtttgagacataatttacattcaggaaaacatacagattttaagtatatagtatatctgagacagtgaaatagataccttcaataaactgaagacattgagatcatggtaattcacaagtaattaacaaatgttagacatatttttacaagaagctagttgttttgttttgattttagatggtatctctaaaagattctgtcctgacattagacaatcagggctatatttttgcatgcttaaaattgacatttgtggtcaggtatggtggctcatgcctataatcccagcattttgggaggcaaggcaggcggatcacctgagttcaggagttcaagaccaacctggtgaatatagtgaaaccctgtctctactaaaaatacaaaaattagctgggcgtggtggtgcacacctatagtcccagctactcgggaggctgaggcaggagaattgcttgaacctgggaggtggaggttacagtgagccaagattgtgccactgcactccagcctggaccaaagagcgagacgccatctcaaaaaataaataaataaataaacaattgacattcatctattttgatgccttcatcttcagattcatacatcactcatcaatggcagaccaagcgctgacgatctttcacccaagttgttggaattcacttctgcacgatatattcgccttcgcttgcaacgcattagaacgctcaatgcagatctcatgacccttagccaccgggaacctaaagaactggatcctattgttaccagacgcgtgagtatgggacggcagtcctgccaaataaaataaaaagattcattttatttaaaggaactattatttttcttctttcctttttggttgttctttccccgacatgttggccttttttcttgccagcagctgtatccttatttcatgtaagattgctatgttgttacagatgctgcctttaggtgatgggccaaaatcatatccttaggtccctcacccaccccgtccccatagtgccataatgtggtgaatgccatggtctttgttcttcacatcgtagtctggttccacatctgatcttcagcaactgagaattttctttcatatcaaattttaaagtttgagacataatttacattcaggaaagcatacagattttaagtatgtagttaagtgtgtaagactggtgtcgcaaaaattttcatatcccttcaataacccaggagtgggattactaagttatagggtagctggatgtttacctttttaagaaaatgctaaacttatataaaaagtagttgtattcagctgggtgttgtggctcacgtgtgtaatcccaacactttgggaggctgaaatgggagggtcactgaagcctgggagtttgggaccagcctgggcaatagagtgagacctcaactctatttaaaaaataaaaataaaagtagttgtgtccgtttttgtagtctgaccagcaatgtgtgagagttctggctgcactacacactgttagatatttagtgctatcagtcatttttatgcccgctgttcctgtgtgcgtgtattggcattttgtgacgttaatttgtgtttctctgctgactaatgttgacaatgtgcttactagtatacgatcagattttttttgtccatttttaaattggacaaaaaataagcctccttgttactgacttataaaagaattttatatattttgtatacgaatccttcatcagatatgtatatattgcaaacatatccgttctacttggtgtttgcttattcaccttcctgtgactttggatgagcagaggttttgtgacgaatcccaatttaccattttttcttttatgattaatgctttctatgacctcaaaaaatattagcttatcccaaatttaccaagatatcatggtaggctttcttttagtagctgtatagttttagcttttacatctataattcattttgtattaatttttgtgattggtgtgagggaggagtcagagttttttttgcttttgttttttttcctatatgtatatgcaattgttctagcaccatttgttgagaatgctttacttgttttggggccgttgttgaaaactattcaaccttattattgtgggtttatttctggactctctactgttctatagatctgtttgtctattcttgtgccaataacaagctttcttggttactgtagctttacagtaggtcttgagaggtcaggtttcttgtatttccttatgaattttagaatcagtttgttaatttctgcaaaaaaaataaagcctgctaagattttcattgggattccattgattctttacaccaatttgtgaagaattttataagacattttaacaatgttgagtcatccaatctgtgcacctgatatataacttttcacttatctaaatcttctttaattctctttggcagagttttattgtttatttgaaaaggtcttgttcaataatgctcaacaatgttcaataatgaaaaaagaaggccgggcacagtggctcatgctgtaatcccagcactttgggaggctgaggcgggtggatcacgaggtcaggagatcaagaccatcctggctaacacggtgaaaccccgtctctactaaaaatacaaaaattagctgggcgtggtggcgcatgcctgtaatcccagctactcaggaggctgaggcaggagaatagcttgaacccaggaggtagaggttgcagagagctgagatcgcgccactgcactccagcctgggtgatagaccgagactctgtctcaaaaaaaaaaaaaaaaagaaatcaaggcacacatagtaagactaaactgttattatttgtagatgacatgattatgtatgtagaaaagctacaaagcaactaccagaaataacaagtgaatttagcagtgttgcagtatacaaaatcaatgaacaaaaatgaatcacatttttagtcactagcaatgaacaatggaaaatgaaatctaaaaagaagtctattaacactaacatgtaaaaacatagagaactggtgagtgcatttcttcagaggaaagcactttgttctgttaatgtgatttacatttcttgatttttgtgtggtagattaactttgcattctagggtaactcttacttgttcatgatcttttctatagagtgctgtattcaatttgccaattattttacggttttcaataatgagttttgaaacattactgacttggtttaagatgcagttggggaattcttttagacttctttgggttctgatgagctaatttgagcctaatttattttaattgagcacaggattctttgtgcatgaaatataatttttaaatgtacatgtaattatattttagattaccaataaaaactcttaaactacatgagatatttgttggtgtgccaacattttcatttcactgaaatctaggttttaatttttgttcataactttctttttccttagtattattattcaataaaggacatttctgttggaggcatgtgtatctgctatggccatgctagtagctgcccatgggatgaaactacaaaggtgagttctagtatttcacattttactaaaacttcaaaacagaaattgtagctataatatttgcattactcttttttattccaaacaaacatgaaaggtataaaattatgctccaaaaaaacagattttcagaaatttaacttgtgtcatttttaaacaatttcattttgctttggaggatatgtttctaattaagttcttacaatgatttttttatgtgataaaatatccctaacataaagtttaccatttgaaagtgtacagttcagtggccttattaattttgaagcccttctgtctgtaagaaagtaaaaaaaaaaaaaagtgcaattataaattatgtttatattttttagaagaaaggttttctcttcctattttctccccttccgttttttttggtgctaaatcaagatttaaaaggggcatggtggcttacacctgtaatcccagcactttgggaggcagaggcgggtggatcacttgaggctaggaatttgagaccagtctggccaacatggcaaaaccccatctttgctgaaaatacaaaaattagtggggcgtggtggtatgcacctatagtcccagctactcgagaggttgaggcaggagaatggcttgaactcgggaggtggaggttgcagtgagctgagatcatgctgctgcactccagcctgggtgacagagcgagactctgtctcaataaaaaaatttaaaaaaaagatttaacagtttatctcttttagcattacattaaatgaataatatgacatcttctccttttattttttaaaatttttatttatttagagacagttttgctcttgttgtccatgctggagtgcagtggtgcaatctcggctcactgcaacctccgcatcctgggttcaagggattatcttgcttcagcctcctgagtagctgggattacaggcacgtgccaccatgcccagctaattttttgtatttttagtagagatggggtttcaccatgttggccaggctggtcctggcatcttcccttttaaaacacttgcatgaagttacttcttattttcttctaatctttgtaattctttacctcttgaataggactattctgttatcgatgctgaaaaatctgtagatgaacactaagaaaattattaataggagtttctaaacccttaataagttccatgtatatttttaaaaaaagtttttattagctaagtcgtattctggttttgctttattcctcttcatttctgtttgtaaccaggttatttgtatatattggcatctaaaaattaaatgccagtttgctttgatgataatcatatatcctctgttgtgaggttcttgccacatatttgacagataggttctttttaccatgaaattaagaaacataagcagatacattttctaattcagttttggcttccttattgtgtagaaactgcagtgtcaatgtgagcataatacttgcggggagagctgtaacaggtgctgtcctgggtaccatcagcagccctggaggccgggaaccgtgtcctccggcaatacatgtgaaggtcagtatacttagaatctgaaggtcagtacagttttcctcttaatacgtcccaagtttatggtgtcttaacaacttttatagttagcaggtaacttgttttcttagaaatttaagtagtttccaaagctgcagatgaccttaaaattttaactattgtggcctaaatgtatctttatgggtttgctgttttatctatgagtcccccttcccgtatagtctattattctgtattaattttacttttgtttttgtttttttaccatgggatatgccaggttgtatattctgtattgatttggatttaagttttaaataagcaatatattcacaagattcctagatctaacaatatgtaaaagtatgtagttaaaagcatgacttccacttcatctccctccttcgcactttttattgttttctagtatgtccttcctaaaattgttatgcatataacgcatatgttaacatatccctccagccaacacagttcttacgcagaagacaatgtactatgcatgccattgtacatatcgctttttttttttttttttttttttgagatggagtctcactctgtcacctacgctggagtgcagtggcgcgatctcggctcactgcaacctctgcctcccaggttcatgcttcatgccattctcctgcctcagcctcctgagtagctgggactacaggtgcccaccaccacacccggctaatttttttgtatttttagtagagacggggtttcactgtgttagccaggatggtctccatctcttgacctcgtgatccgcccgcctcggcctcccaaagtgctgggattacaggcgtgtgccatggcgcccagcccacatcgctttttatatttaacaatgtattgtgaaattctttccatattagcaattagaaatgctgtttttaaaaacagttgcacagaattccattatacaaatgtagtataatttattaaacaaccacctatcggcggttattttgatggttattagtctgttgtccacacaaacaatggtgcagtgattaaccctgtatgtgtccttctcaagtgggcaagtacttctgcgaaatataatcccaggagatggtttgctgggtcaaatgggtatgtgcatttattattttgatattaatagctcttcccaattgtcctccataatactgcccatatcttattaaaattacttattctaggattttaatttaatctaaaatcatagaacttacttagggaggttaagagttttctttgtataaggcatgctatgtaaattaattgagatgttaaaaatattctcctagcatgtaattgtcacaataaagccaaagactgttactatgatgaaagtgttgcaaagcagaagaaaagtttgaatactgctggacagttcagaggaggaggggtttgcataaattgcttgcagaacaccatgggaatcaactgtgaaacctgtattgatggatattatagaccacacaaagtaagagtatttctttgccattgctgatcttcatcatcttccccaggtggaaaagagactttgtcaagtcttaacctctgtattggagacttttgtaatatttcatttatatccttgttatgccagtagtgtttttatatatatatttcctactctatcctgcttttcttgctcaaaataagatgtcagtcattgttatttatcttgaattcaggggtccattagctatgtaatcctgggtcataatactaactacagatgtgaaaattcagctataactaaagcagctgtctcttgcctgtaggagatgttcagccaatcttttttttttaatttttattttttgagacggagtctcgctctgtcgccaggctggagtgcagtggtgcgatctcggctcactgcaacctccacctcccgggttcaagcgattctcctgcctcagcctcccgagtagctgggattacaggcatgttccaccacacccagctaatttttgtatttttagtagagacagggtttcaccatgtcggccaggatggtctcaatcccttgaccttgtggtccgcctgccttggcctcccagagtgctgggattacagatgtgagccaccacgcctggccgtgttcagccaatctttaattgacttgatatgtagttcttacatgagtccttgtggtgtcctggttataacgtggctctgagagacagcagcgcgaggggggctggagagcagggataatagaaaaagatgacactttgctaagggtactaactactgccaccatcaaaaagatgtttgggcttcctggcttgggatcatcttatcttcctcaaacctaacccccacccccatgcacaaaatcatcgtaatagtcccatcttgagtaaaaagccaataccttcttatttatactattgccaacattgctgttatttctagtaagagaatccagggcaacctctgcctttcaggtgtctccttatgaggatgagccttgccgcccctgtaattgtgaccctgtggggtccctcagttctgtctgtattaaggatgacctccattctgacttacacaatggtaagtacttgattcacttttgtgcttgtaattgattttgtgtgtgtgtggaagatttgcacatactggaactaatggtaatagccagttggtaacatgattattgattcttttgttcaccaagtacgtatcaagcacctactatgtgtcaggcagtttttgaggacctgggaatgtgtacttaacaaggtagtcaaagtccttgctcacaaaaacactaaacaaacaggtacatgggtaatataatgccaggtcgagaggtagtgtcatggacataaagcaaaattaggactcatgaatggagggagatggggtaatgaggtgacaatgttggggtgatgaaatgacatttgagcagataattgagcatttggtgaaggaagaaataaggcccagtttaaagccatgcgtggaacacagtaaatagcaattgctctccttagcttttagaagacatttggagggcttttgcataaatcatctcacagatcaagcaagtcctcccattaacttggtaaatgtcagagttctctttccgtttcaaaaactggcaaattgacttgcaaataccagagtctcctgaataggttgcgtctgttcaaagactcttgtgaccccatcaagttctcagccactggcagttaaaatggatatcgaccagtagggatgggtgggccccccagcgatggggagggtaaattacccaactgaattgattcttacgtgcacctggtgaggggatgatgacgatgataataatgaagatgatgatggtgatagtggtggtgacatttaccctcaattgagttcatttaaaaaaatatatcatttaaactttgcaaccatagcagatagaaattacttaacccactttgctgtagctcagagcagtcaagaaggttaactgcctgaaggtttcaaaactgacattaaaagcaaagatagtgcttgctgctctctgccacttgcctctgtgcttttttttttttacaaaacagttttataatttacaacgatacagttctcccatttgaagtctacaattcattgttttggtgtattggtgcaaccatcaccacaatctaagagtcgaacattttcatcatcccataaagaagccccttacaaactagctgtcacttcttactttcctccagccccttctcccggcccctggcaatcgttaattacctttttctttgcagatttacctattctgaacttagaaatggaaccatatatgttggtttttggtgactggcttctttcatttagtataatgttttcaaggtcatccgtgttgtaccatgtatcagtatttcaaccctttttattaccaaataatatttcatagtatggacataccatgtttcatatatccattcatcagttgatgaacatttgaattgtttctactttggggccattatgaacaatgctactagggacttttgtgggtgtatgttttcattattttattgggtgtttacttaggagtgcagttgctggatcttatggcaactctataacttaacattttgaagaagtgtcaaaaggttttccaaagtcactctaccattttatattcccagctccctccacgggtttcatctctgttttctttctttaaacaaggaattggcaaactatggcccatgggccaaatccagcacactgtctgttcttatgaataaagttttattggaatggagatatagccatttgcctgtgtattctctatggctgtgttcgaacaataatggctgagctgagcagctgcaaatgagactctgaggccaaaaagcctaaaatagataccctctgaccctttacagaaaacatttgccaacccctgctttaaacctcttttgccttcatgttgggtcattgccattgttgtctttctagggaagcagccaggtcagtgcccatgtaaggaaggttatacaggagaaaaatgtgatcgctgccaacttggctataaggattacccgacctgtgtctcctgtgggtgcaacccagtgggcagtgccagtgatgagccctgcacagggccctgtgtttgtaaggtaagtggggaggtcagagacacccctgagcttcctttgagcttctctggaaaaggagtgttttccattggctccaatgatcagttcttgagcaaagtggtaaggtttaagcagaactccccttgccccttctctccaagccacaccgagttggctgtattatatatgcttggactcacatgggcatctggcttctttttttgtacctctggtaatggtgatatattccagaggcatttctgtgacttcttagaggacaccaaacactgcatacctttatattcccacctcctctgtgggcctcatctctgttttctttctttaaaccaggacttggtaaactatggctcgtgggccaaatctgacacactgcctgttttgtgaataaagttttattggaacagagctgtatccatttgcttatgtattttctatgactatgttcaaccaataaaggctgagttgagtagttgcaaaagagatgctgttgacccctagcttaattctatggtattcttttccagctttgtattcggaagagaaccagattaacattaaatttctgagaacaccaattaaacgcagatatgctattttgagtgtctgttaaaaaggagttgaatagtcataagaaatgcattaatatggtgccagtgaggggttttatttggccttacaatattaataacaatttcttcataattcataggacattccattgtacctatgtgcttattcccacctgtgcagtcttaggcacatgttatatactactggaaataatcttgagcatttatgaataagagaaaattctatagctctcttcagattttgaaatgctggaaagatcagtaaaaaaatgaaaaatttaaaacaaaacaaaacaatttaaatggaatgaccgagttctaagatctccagccttgttcttgagtacaaaatcaaattatatataattcaaaatctctattctggaaatattgactttatgaggcctcacctttactttggacgtttattcacctgtctctgtggatcaccgaacacctatcttgttaatgtcattttattctctctggacagacacattggtttcaaaagctaatcttttaccctaacttacaggaaaacgttgaggggaaggcctgtgatcgctgcaagccaggattctataacttgaaggaaaaaaacccccggggctgctccgagtgcttctgctttggcgtttctgatgtctgcagcagcctctcttggcctgttggtcaggtgggaggcgccatctgcgcggcgggatttaatgagcaggtcgtattgcacaagcttggcacgagctgtgtgaggaggaaatgaggatgacttcccgtgacaccactctcatcgctatgcaatgatactgacgtgggtcaaaggcagccgtctgcctctcaagattctttataggtcatgtgcttactcccacacacatttctctatggaaaaaacaggatgatgtggcactagagaacacgtcttgtttcaatttcttctgtggggaaatggattgggtggggaggtcggctctccctccgcccgcccctgctgctctcaggcctgggagcccagagggccgtggggccatggggattttccagctcaaagacgctaaggagtaggaggccctccagtggcgagggtgggaacagcggcacgtggtgcagggtttaggaatgcaggccaagttgtttccggaacagggagttctggggtgatgggttcaacaggggtgtccagtggtggctaggagaggtggagatggtgtgatggctgcaggcaagggaggagctgctcggtagggacttacccagcagtgactgctgtggacaccacgctggggggagtaccatcacctctatgtcggtgacgcattgggagtataagatctagaggttatctttgtacatttttcaacatttgggtaaaaagcagggggcaacgaagaagagggagtcagacttagcaagagacattttgctgaatgcatttatgatgttctttgttgttttaaatctaaaatctatacccatggcctttatggttttgctcatttatttgcttatactggatctggatttggagtagtgagacttgttctcaggtcctcctggtcctttacaagtggaagggtcaagggtcatgaggttcagcagccacaggtgttatgttaatgccatccctagagaagctttctggcccatttcttcattgtgaaaatattactgctgcactgggtgaaatctaaggtaagttctatttcatacttcaaaattcttgaatttgtttttaaggtaaacagtatgtccgggtggctggtcaccgacttgatcagtcccaggaagatcccgtctcagcaagatgcactaggcgggcgccatcaggtcagcatcaacaacaccgcggtcatgcagagactggctcccaagtactactgggcagcccccgaggcctaccttggaaataaggtgcgtgtgaccctgcaggtagcgatgtctcagatgaagatctcagggaacactgagaaagaacttgcgctgcctgcattttaggtagtctcatagggcacctgagtgttggacagcatttcatagcctgtacttgcatctgatgatacaaagaaggttttctagccttgttagactttatgttgtattattcaaataagaacttctgctcttctggtctggttcctgagcagtgtgtttggtgaagtctcatccccgtctctgagataaactttctgggtccctggatcacttgtttatgaagtgttcctcacattcccgctttgtttagtttgccataggctcagcttagagcctccatggcttagtggagggcctggcatacaagaaacaacccagggaaggttccagcaatgggactgctgtgctgctccctcactttgagtaccgtggcaggctgtgctcatctgaagctcacatttaggaacagatggaatactttctgcttttgttatatttcaagaaaatgcaaactggtgattctgcaatgtggaggttggtttgtaggcttgggccttccttgcaatgatgtgttcccattcccccctccccacttatgccgcatctctccagattctgattgatacgaaaatttattcccgagaatgcatctcaattattatagctccctgcttaccttcccgggtttttggttttgttttgttttaaagtaatggcatacaggcatgctagtgtagtcttgtagcttggtacgcttctatttaatttgatgatattttcattttaaaacttgttttgtatatttttaaggagtatttatttttgaaaattatttttttctcaaattataatcctagaacatgtgctctattgatatgattttatcaacagagttcaatgatttttttttctcttgatatcacttctccaattttatggtgcaaagttgggttctgaacaatatattgctgtcatatacccatcagaaagaaaatcttaattttatattgaaggacatctaatcagaagaaacacctttagtcctttctctaactagcaaatcagacatattctttgttgtcctatgaggaggatgctgaaatgaaaatgtggagattgtagacatgggtcaaactcctcatcccctaaattacttaaccgaagtaaatatctattgtgtgattaacaaaagtttatagtaatttgccttgtggtctctaacaaagagtacatttttcttctgtgctttcaaacagtgtcctgcatgttggtaatattgattaaccaaaatgtttatgaatatactcccctttcactgcctttaatgtgaatttccttgtctgtcatggtcaaggggatagttgtagcctagttgtttgcagatggatcccagtgaccacttcctcttacttgattgttgctgtgattgtcttcccctttcgtgttcattctcgcttaaacatttcagctgactgcgtttggcggattcctgaaatacacggtgtcctacgatattccggtagagacggtagacagtaacctcatgtcgcatgctgacgtcatcattaaggtgattgtttttgctttgattctgctatagagcttagggcttagtgggctgatagtttatgactgaaagttactaggtgaggacatcccagcaaggagctggtggccaggtggccattcagtagaccctggacttgcgtggggactactgagatggtgagtgtgagaatctgtctttgagcccatttctggagttgcctcaggacagcacccgccactcttctcttcatctccagggtgtacccatcttttcacatttaaaaagaaagggagctgggcttggtggctcatgcttataatgtaagtgctttgggaggctgagacaggaggattgtttgaagccaggagtttgagaccagtctgggcaacatagtgagacccccgtctctcaaaaaatattagccaggcaccgtggcacgtgcctgtaatcccaggtactcgggagggtgaggcaggaggatggcttgagcccaggagttcaaggttatagtgagctgtgattgcaccactgcactccaacctgggtgacagagagagagcctatctcaaaaaaaaaaaaattttaagtaaaaaggagacaaatttttgctctgaccttgaatcttctttttgaagtctcttcttccctgtgccactttgcctctcagatgaatggattaggcagtacttggcggtctgaggacagtagacgtgttgccatacttgtcctcagcctctgtccctatccccacatcctcagtctccataaaaagatccagctcagtcaggaggactccccaagtggtaatgtcccagggtctggggcatgtctgggcagaaaccactccaggttcttgtctctcatgtcctttcacctggagctatcttcacctccatctccagcctgaccaattgcagaccgcacacggtaaatcacttttgtgaacagcaacttgatgaaaagctggagctatgtttacatactttttctacttctgtactttagttaaagattagaggtgtcagatgggttgctttgataaaagctgtgggcaactgcacgactttctttcttttccaagatcccagcgaagtacacaggctttcagtttattaccagaacccctctaaaaataatacaatgaaacaccttttctctgataattctgggccaagagctgtacacaccattacacgtttgccacaagaagctaggcacgaatgaaaaaccacgttgctgaatacaaaatttgattttatttttattttatcattaaattgaatgacaaatatattttctcttgtttttaaatgttagggaaacggactcactttaagcacacaggctgagggtctgtcattgcagccttatgaagagtacctaaacgtggttagacttgtgcctgaaaacttccaagattttcacagcaaaaggcagattgatcgtgaccagctgatgactgtccttgccaatgtgacacatcttttgatcagagccaactacaattctgcaaaaatggctctttacaggtatgtattgaaaatggaggaaaaacttacggtgaaggtacttccattttatgtttgtttattcatatatatttaaagctcaacgtattttacattcattatattaaggacacagctacaggatctggctgtcttaagaattattaagtttataaatgtaattttattgaaaacgtaagaacagttatccacatcaagtgtatccagtagaagacagacttgacattaggatgagaaactttcaaagggggtttctgggaaatgcacgatgagttagcgattgtctggaccatgttgcacctggttctcaccatcctaatgttaatggtcttagcttttactcagtccatttaagtgaacgtatccatcgttggtcatttgattactttcgggaggacaatttctggcaatgccgtgccaagcataaaagttgtatgcagctaggctgggcatggtggctcacacctgtaatcccagcactttgggaggccgaggcaggtggattgcatgaggtcaggagtttgagaccagcctggccaacatggtgaaaccccatctctactaaaaatacaaaaaattagccaggcatggtggcgcatgcctgtagtcccagctattcaggaggctgaggcatgagaatcatttgaacccaggaggtgcacgttgcagtgagctgaggttaaggcactgcactccagctggggcagcacaacgagactttgtctcaaaaaaaaaaagttgtatgcatctaacacaaacatagcatgacacatttaagggtaatctttctatttgtgataattgaatggattaatttttctgaggtgcttcaactccaaataggcaacaccagacctttcccacagtcatctatgggcagcagcatgactttgtaccaaacattgaaggcatttccagggaataatgatggctcccagataatatattgttgtgaaagacctttagttatttacaaaaatcacatcacccttttattggatttaagtctttttttttttttttgagacagagtctccctctatcacccaggctggagtgcagtggcgtgatctcagctcactgcaagctctgcctcccaggatcaagcgattctcctgcctcagcctcctgagtagctgggactacaggcacatgccaccacgcccggctaattttgtatttttaatagtttcaccatattagccaggatggtctcgatctcttgacctcgtgatccacccaccttggcctcccaaagtgctgggattacaggcgtgagccactgcgcccggccggatttaaatcttttaggagcccatcttcattgagatgtgagatgtatttgcgagcgtgtgagtcacataacaatctgtctatttgtaggttggagtccgtctctctggacatagccagctctaatgccatcgacctggtggtggccgctgatgtggagcactgtgaatgtccgcaaggctacacagggacctcctgtgaggtgacgcttctctcttcctgtctttttcctttcgttccttcctaaggggaaaacagtgcactgaaggggatgtcatggcaaacatttgatttttagctttagcagcccaatgtttggctcagtcttttttgggcaatagaaatattagaagtcacattgtttaaaaaaatcagattcctccaccaggaatgggctggagcaccggacaatattctgacttagtgctgccctcttgccttagtcaacaagaaacttgcaatactcatgccattgactgtgtttctaaggaggatggaacttgatcatatctgaacatttacaaatcaccagcatgtgacctgggtagctttagacaagccagccctattttgagaccttttatggcccctcgctattttactttggtgggctccaccttacatgtgaaatatatgaaaatgcgcttggaatcctcaatgaaagtaatctgttgctaaaaatattttgaaatcacttggacaaacatattgatattaataccataacaagaataggccgtaagactcattgcacaaccattacgtttttgtgtgtgtgtttctacctttaaaaagaaataaggaactggattatggtgatggttgcacagctcggtaaggtttttactaaaagtcattgaattgtacacttaaaatgggtgaattgtgtagcatgtaaatgatacctcagttaagatgtttaagaaaaaagacatttctgtactctggcaactgagcagtttctgtttgtaacgtagtggaaagaggatgactttcccttctcttgcagtcgtgcctctctggctattaccgcgtggatggaatactctttggaggaatttgtcaaccctgtgaatgccacggccatgcagctgagtgtaatgttcacggcgtttgcattgtgagtctctcactgtagttcaggtgccctctcctcctcaattcagagccatttgctgtgtacaagtgatttttttttaagtgcttcctccacggaataaccctagcctcatagaccccaaagaaaatttacagatttaagctcatgtcatgaaatgtttcccgtttttttttttgttttttttttgaaaaaagttactttggtaatagtggaaaagggatatacaacttcattatagttctttttattagattaatataaagtaattgtttttatttgctgagactataaagcaatagaaaggtaaaaaaatgttgtctacttattaaatacaaagcataggatctttagatgacagtgctaatatttatttatttatttatttgagacagggtcttaccttgtcacccaggctggagtgtggtggcaccaacactgcttactgcagccctggatcttctgggctcaaatggtcctcccacctcaaccctccaagtagctgaggccacagacaatgctagtattttttttaaatcatgatattacataatataccctaagaagaagaataaagtataatcacactcacttatataccatgctttatagttagttgggataaattaatcaaacaggtacttctttcatgcaatatgagttgaaatagggcttaagaaataggtagttaatcttgagaatgaactttggggcaggtgtggggcaagacttgtttcttaacttcaatcaggaattcttctaggccctatgccctgaagccaggccacactctggggtctcatgggtttgatcctcagaggtggagtgactgcatatgctgatcagctgtaccctggtcgcctggcagggaaatgttcatgctttttccaaaagagattgactgagtcacagagttagggaaaattaattaccagacccagggagaagatcttagaatgatgtccaggatggcttatgtccaggatggcttagaacttaatttttctttattctgtaagtaaaacttttgttttgccctttgttctgtaagtaaagcttctgtaggaattgcatgaaggggtggtttacgggcagactcagtccctccaggattgctttcctcaggtgcacagcttccaaccgcttgatgaggtggttgctttttttttcacctcctttcctttgccatttgggtttgcaaggcctcctgccagcatttggggtggggtggggtggggggtacagcaggctgtggttctgccacttatgtcttttgtagctaggctgaaagagtagatttctcatgcttccattaatgtatgtttacaaatatatattcacattaaagtgataatgctaaatagcaactggccttaaagctttaattttaataaataataattttatagctttaaacatgttttggaaataattttagacttacagaagagctatgaaagagttacagaagtacagagagttctgaagtaaccttcccccagcatcccctaatgctaccatcttgcataactagagtggagttatcagaatgaagaagtagcacgataagatgaactacaccccacattctgatttcatcagtttttcactcatgctccttttttttgtaggatcgaacccaggaccccacaccattcagtgactttgcctttttagtctcctctcctctaggaaagttcctcagacttccttgtccttcatgactatgacacttttgaagagcactgagcattctgtggaatgtcccccagccagggcttgtctgatgctttcttatgactaggttgaggttacacatttttgaccagaagacgtggaggtgccgtgccctctcattgagagcagatggataggatatcattgtgtcttcttcctggggatcttaatctgggtcacttgaattaggtgatgtctgctaggtttttccactctgaagttactatttctcccttcttaattaatgtttgagagggcaaaaataataaaaatttaaattagaatttaaggaaatacaaaaaacgtggtagcatcatatatctgttaaatctaaccttgctggtttttttttttctaatatattgtaaaaacaagcttgaattcttccttttgtgtagttgttcatagccctgggccttgcgtataactatctagcttccaggagttaattctttattcacagttcattagagatgaggttccagttgctcttagagcccctgtttttctctctgagctctcttagctctttattcaaaggagaagtctgtgtattttccttgcagcttggcatgatttagaaaagagaatggcatcacagtaaattgtgcatgtcttgggccctcatgtctttcttttttcaatcgaaagatgtttttcctccccaaggagaggaatagtctcattccttcacataccagattcaccaacagggacagtcaggtaaagggctggtggcacacgcctgaaaaagcactgaaacagaccctcagtgggtttttcaacagaactacatactagtttccccaaagagaaagaaagcactatctgactccttgatcaaagaaaacataccatagacatgttccaaatgagcattatcaaatatttttaaaatgaaattgcagttactctgcagaatacttttagctcaaccatgtaaccctttactaagaccagttgcatcttgaattaatttggattcattatcaaacccaaggtcctatgaaggatgggaaggaaaaaagggtctaagactctgttgtctgaggaccagcagtgtgggcatcacctgggagcttgctagaagtgcagaaactcaggccccacctcagatcccctgaaccagagtctacaggtaacccaggtgcacttattaatagattcatattccagtttagatgctctggtctaggataaccctaagtaaaactgatgaaaccctggagtaaaatggatgtaatacaaatgcttacaattccaaattaaatgtggtatatgggaaaactttcatcaacctgaggaatgatggaaatgtatatggtttagaaactgaaaatactaaattgctagatgaaaaatgaccaatgaaagtatgtaaaatgagtggccgtaggagaaggggacacggggaaatgggagctgaggtgcacaccaagaggagcagcgacacacgtgtgcagaacaagccccgctcccttcgagcccgtagctgcccgggggtcagtgctgcctggtcctggccccagtgccgacctccgcacccctcccctttgctcctgcacacctcctaaccaccgactgcactttcttttagaatgttttaaatgagggggggaaggtttttcatattttttcatgtatgtaccatttccagtgctcttcattcgctggtataaatctatgatttcgtctagtaggtatcacctttctacagcctggattgttagcctttctgtagtgcagatctgctggttgacagattctcttaactctcctttatctgaaaaaggcttgccttcagttttgaaattgatttttacagatttctctttcagtactttaatattgttctgttgccttgtggcttacatggcttcaagtgagaagttagttggtggtcatctgcttatttctgtgtgttattctgccttttttctctgcctgctgttaggagggtctctgtgtccctgggtttgaacactttgactgtgccttggtgtgtatttctttatgctggggtttattgagcttctagaatttgtgagtttgtagctatcaacttatgaaaagttttgaccaaatagcttttcagcttcccacgccaatctaattgcacgtgacattgatccacagatgatagaggctgggatcttttgttttttcctgaagtttgagtttctgttgttgtcttcaaattcactagtcttttctcctacaatgtcgaagccgatgcccacccattcagtacttcattttggatatggtagcttctagttctagaagttctacttggtcctactttatatcttgcatttctcttttcacagtttttatgtttccttcaagtctttgagcatgcttataatagcttttttgtttttgttttgagatggagtctctctctgttgcccaggctggagtgcagtcacgtgatcttggctcactgcaacctctgcctcccaggttcatgcaattctcccacctcagcctcctaagtagctgggattacaggtgcacaccaccacgcccggctaatttttgtatttttagtagagatggggtttctccctgttggccaggctggtctcgaactcctgacctcaggtggtccacccgccttggcctaccaaagtgctgggattacaggcgtgaaccaccgcgcctggcctataacagtgttttaaaagcctgccaattccatcatctctatgatttgtggacatgtttctaatgactgggttttgttttttttttcccctgattgtggatcgcttttttttgttgttgttgttgtttctcatgtctagttattttcattccccataaaaaaaaacccagctctttatttggaaataattaggagtttacccaagatttgtaagaataagagtggtacgtagaacacctgccatttatctagactcccgtgttgttgccattttccccatttgccttattaatatcattatctgtctacctatctaattatagtatgtttttctaaactccttgagaatagtttgcatagacaatggccattttggtgtgtatattgcaagaataaggcttgtctcttgtataaccatagtacacttatcaacttaagtcaatgtaacgctggtactctactttttctaacctaccacctgttgctcagttttgtcagttgacccaattatgtcctgtatagcatccttccctccagcacaggcccccatctaggatcagatgttgaattttattgttgtgtctccttaggcttttaacaggaaatgtttctactgcctttctttgtattttatgctattggcattttgaataatataatcttttttttttttttttgagacggagtctcgctgtcacccaggcagtggcgccatctcagctgactacaagctccatctcccaggttcacgccattctgcctcagcctcccaggtagctgggactacaggcgcccgccaccaagcccagctaattttttgtatttttagtagagatggggtttcaccgtgttagccagggttgtgttgatctcctgacctcgcaatccacctgccttggcctcccaaagtgctgggattacaggcatgagccaccgcacctggccgaatatgatcatttttttaaaaaaatacaatgtccttggttctgggcccttcttttgtttctcttggattattcaggccggaatactttgtcaaggatgagtctctcagagcactgccaatgggagtcccagtgtctgtctggccctcactggtgatattaattctgattacacaggcaaggtgttggtcaatttttccactatatatgaacgattctttccttttgcaactaaaaaacagttggaggcggacactgtgagaccacgtgcatatcccactcttcatcagaattccccttagaggtagcagtcggaaggttctggccgaagcagcacttgctgtcatgtttgcaaaagcttgatcctccatctcctgcccttgtccatgctcatcagtcagagagaaagctctcagatttctcatttatacaaattacacttgctgatattaatctgaaaacaggaggccttcctcatatagctcagaggttggtgactggttttagcattttgtcttttttttttccgcttggacttcaagttgcttatagataaatctgaaaatcctttaagacaacctgagctgattcttctggtgcatgttcctaggcgtgtgcgcacaacaccaccggcgtccactgtgagcagtgcttgcccggcttctacggggagccttcccgagggacacctggggactgccagccctgcgcctgccctctcaccatagcctccaacaagtaagcctcggacctcatcagcggttcctgccagcatggccaggattcccacccagatgcgtactaatgacttcagagcaagactgtgtgtgtaatacgtgtgtgaattttgcccagtgacaattgatttggattaaagacagaggggtgggttattttcttgtaaaccaacgtttggcttatgaaagcaggcaagaagaggtgtgtgccagcaaggacctatacacgccgttttccctcttgattcctcttggtcatcagttgtttcacaagtatatgttgtctacttaccagtgggctaggaggtggagggatacagagaggaataaaacattgtccctcgacttagggagtttttgatctaatgaccaaaatatgtacgcatgaggctaaacaagagcagtctaaatccattcattgattcaacagatatttatggagtgcctactgtgtcctgagttttacagcaggtgttctgaatagcaaactgttctcacctggccgtgggccccaggggactcagtgtggtcgtgactgtagtgaggcctgtccaccagatggtggggaggagggagagcagtgtccagcctacctaggtgggtgcaggaagctcttctctcagatttgcaggagaaggagtttcacaggcagcatagacgggcgttctaggcagatggagctgggcgtgccatggcatggcagcaggaacaggcatcgcccatttgaggaactgcagcaggccatggaacagaaggcatggagggaggtggaaggagatgtaccaggcaaggtcttatagtcacactggggcaagtgcatcccacaggccagcagcttaaaagcctctgtctctcgctggtttaacctttagaactcttccttcacccactctcaaagaattcccagtatataaaaaggatgcagtcagggttactcatgatgaaattgggggtgggtactgtcatccaccctgcacaggatcctcaaggtttaggaatagggttggaaggggcatccgttagcagggggtccctggagaggtgcgagagcctcctgaccactttgtgtttgagtgagctcacttttgccctggtatgggcagtgctctgaggtgggaagtcagtgccagggaacccgagctggggaacccagcatcctaggagcacccgagcaggcctcctggaggaagcatcagctgagttgggcactggggctgagctgggttaacccaggcagacagcgagagaagcaggcgcgctgtgggctgagaatgagaggagtagggagcagggagtgaggagtgagtgtcagtgcctggatcatgggaccaggagtctgtgaggggttgagactcacagggtgggctgggtgaccagaggccccggattctgagctaaggaggtctcattgaaggtctggaagcacaggagtagtagaaatgaagcattttaaatagttagaaattcggcttcatccattggaaaattttgttcatttctaatgttttgacagtttcagccccacctgccacctcaatgatggagatgaagtggtctgtgactggtgtgccccgggctactcaggagcttggtgtgagaggtactctgcatccactggcttcaacacattttcgaaattaaatataaattctatgtgtttatttttaaatgcgtagttaagtgtggttttggagttttgatgcataattgttatttcatagaatcattgagaaaaatcagtatttcatgttttaaaattaatgttaaaccttactgggaatttttaaagaacggtactcttttcctggctaatctgagttctcatcaagaacaataggccgggtttggtggcccacacatgtaatgccaggactttgggaggctgaggcaggtggatcacctgaggttaggagttcgagaccagcctgaccaacgtggtaaaaccctgtctctacaaaaagaaaaaaaaaacaaaaggccgggcatgacggcgggtgcctgtaatcctagctacttgggaggctgaggcaggagaatcacttgaacctgggaggtggaggttgcagtgagtggagattgcgccattgcactccagcctaggagacagagtgagactctatctcaaaaaacaaaacaaaacaaaaacaataggaagcagcaaggagtcggtatctgtggttcacacatttgaatattccattgctccgggctgttctggagatgacaggtggtttgctttagtagccgtcttctggctcctgaaggccagtgctgtctttcctatgtgtgcgtctcagtgcccagctctggctgagcctgcaggaggctgtgcggcatccggagtggtcaggggtgggtcagagttggccctggaaacaggtgcatgtcccctggatttatgcctcattttggatgctctcccccttcaccgcgacaggtgaaggagatctgggaatgcccgagtggggagtcatatccctttcacagtaaatctcagggaacagagtccgtctgatttattagccattcagggagtccctggatagtgcggtaaggccttaagtaactgcatttgtctgatcccactttcaatctttgatacagatgtgcagatggttactatggaaacccaacagtgcctggcgaatcttgtgttccctgtgactgcagcggcaacgtggacccctcggaggctggtcactgtgactcagtcaccggggagtgcctgaagtgcctggggaacacagatggcgcccactgtgaaaggtgtgctgacgggttctatggggacgctgtgacagccaagaactgccgcggtgagtgcgtgagcgtgaagtcaggtcagctgtttattgccataggaagtcttcaaccgtatagtcacatgtgtcacacagggccccgcctaggaggtcacactctcttgaggggttacttgcattaatgctgggtctctgatcaaatacagacccacgacccagttcttccctagctaccctatcctgagcttggttagtcataacccataggggtcagtggcctggaaagatgcagcctgccacccgagcggccagtgtgacttgacagagttccggctctgctccccgtgactgaaatgaaagtggggaagctcagagcctgtcacattcgtaagggagatgcttcagaggctgcacgaggcagatgggattccaagatgaagggtgggaaatggtaagactgtaaccccagaaactgcgtaaagcaccgtgtggtgcatcttagccctctgtgccagaactgcccgacccctatggcactctgctgaattcgatccttgaaattatggatcgtggagaaaactagattctcctgcacagcagatgacctggccggagggatgattcagccctcagattttgaaggagtgaaagaacaaaagtggcaattataaattattttgagtatttcatataaacgccagtcatactatggtactacgacatggggacacaagagggcaccagctgtacagaaaacatactttcccaggcacacgtggagagattggaaatgttttatggccctgggccaatcaagctgatctccagcaggtggccaccttgactggctatcataccaggataattatgataacagcatttctacaaggcttcacgatttgtagaatgtttttatcattttcatgtcatttcttttcatcattactgcaagccttggtgattcattcctccgttcattcattgtttattaagtgtccggtatttcccagacactgtactaagaactgcgacaggtagttgggaaattgtgattcaagtctactgggaagctacacatgatgatggtatggggggaaaacatacctgtggatccaggtgttggagtctcgactaatgtgagttttattccaggaccaactgtgtgacattgggctaatttattagcctctctgagccactattttgttattcataaaatagacataattatatgtgtatatcaaggcctttctgagaagtcagtgcggtaacatttaaagttctagacatgaaataaatggcagctattataattactagtaataaaccaattattattatattttctaatatataatatatataatataatataatatattattatattatataatatatattatataatataatatattattatattttcactccactgctgtccaacagaaatacaatgtaaaccacccatgtaatttaaaattttttagtagtcacatttttcaatagtaaaaagaagtaggtgaaatgtattttaataatacattctatctgagctgatatattaaaaataagcattttgtcatgtgatcaggttttaaaagtattaagcaatatttactttcttttttagtactgagtcatcaaaattgagtgtatattttatagcccagctcaattaggatgctacattttcctcagaaatacttgatctacatgtagattacagaaaatttacaattgaaaaggtagttcaaacatatttaaaatttttccgtcctgtaccaaaaattattttctttaatattggcatccacattgacaaaaccgcttcagtatttaaatttaaactcagagatttggttcttcgcttgcatcagccacatctccagcatttggtagacatgtgtggttagcggccacaggacaggactgtgaaggtcaaggcgatgaatgactgtcgggggttgcacttgaaggcacggaggcgggcaggcccatcagcccagggtggcccgggctgcctcctgaagggggtgctgttcatctgagacctgaaggatgggaagaagagccccaagaagagtgaccagcgtgggaagacgggcccaggcaagtaggcaggccctgcccgaggtagacactggagagagagtgaccagaatggaaaagacagagacagggaggggaggtctcgggctgataggtgggaagcagccacgtcggaagggtctcctgtgcagtgttgaggtgctgaggtcacctcgtcctccctgtcctgggactcaccagcaacttgtgcagacatggagtgggccagggtgtgattggagctgtgtgtttgaatatcgccctgctgccagcgttgaggagggaatggctgccaggggtgttgggttaggagacaagacccgaaatgaatctttctggtaagcattgatgagggcttcaggtagggcctttgccatggagataaaagagaagacgtaaaataggtcttgatgacaggttggaaggtggaggaaggacggttagagcagctggggtttgggtctgggcctgggctagtagggctgatgctgaccaggctgtctctggtttctgaacacttaacagcttttatcctttctcatcccttctctcgcatcccctcgcttcgatgagacaaagtcctgtgaactgtttctgcatatcccacgagcagtccttccatttctataacagggttccctctgtggacttcttgtagggccccccattcttatataatactatagtctgttaggttaaaccaagtgcaagtgccggtgttgtgtgtgattgaccttctctaaagcaagcgcgtatagttcaacccagtatttatctgtttcccctcaccccccataactctcactcacttgaagcttggtaggaggagaaactgatcgtcaggttcacctcctgcctctgctgtggggcagcggctgcagccggaggtgtggacaggccgtccaggtagagtagagcactgagggagatgagggtggtgagaaacctcacagaactctaatattaaaggactcttatattaaataagttaaatgaggataatttttatattgtgagctactcctgagaattaaaatatatataaagtacctggctattcagtaattggcctaaaataacactattttaaattagtactatttataacataaatactattttaattaagaattactataataggccgggcatggtggttcacacctgtaatctcagcactttgggaggctgaggcaggtggatcacctaaggtcaggagttcgagaccagcctgcccaacatggcaaaaccccatctctactaaaaatacaaaaattagctgggcgtggtggtgagtgcctgtaatcctagctacttgggaggctgaggtgggaggatcacttgagcctgggaggcggaggtggcagtgaactgagattgcgccacggcactccagcctgggtgacggagtgagaccctgtctcaaaaaaaaaaaaaaaaaaaaaaaaagaattaccataataattattactgcagagagagaactagtaatagcagtgtgacctatggaaagttatctaatctttccaagttgtagatttcacaccgaaaatagagaacattatttcgcctccctccttggtttgtggtgaaagtacaaagaaatactgaatgtgacaggcacagactaacagacacatcatacagtgaatatgattttttaaattatcatcaatagtttacattgatcatacttgcattgaactttaaatattccccagagaaagaggcggcttgaaatgaaacacggaggggagacacacgagaaacaagagggagggcaggagagtgggcgtcccaaataccacaggaagagggcgatgcaaaagggagagggaggtcacggggtcccttccgcagagccacggggtaagagggggaccgaagtctgctccctgaatttggtgcctgggaaatctctggagactttagggagaacagttgcagcagacaaggggccaggaggacactatgcgaaacttggattggacggacgtgccagggaggtggatgttctgatggaggataaaagggagggggtgtcttgtgtttgatgggggcagtggagaaggatgtgctggggagttagcagcagagtccgcacggtccagctacggggttgatggagcaagtccctgaagggcaccggtgaatggggcctctcgtgggactgcagcattaaggcccccactccaggaaaacagacggccagcctggcctagatcatgaaggaggcggatcccagcacgtttcctctgcccctgaccttcccatgtcatgtcccatgtccagcactcttgctgcagcctccaggtcgtgtttaggccttccattatttgtgaagtttttctctcttttttcttacattgttatgtcatgacacacactgtacatgttctgagtccacacatttataaagagtgcctgggggcccggcgcggtggctcacgcctgtaatcccagcactttggaaggccgaggcgggcagatcacaaggtcaggagatcgagaccatcctggctaacacggtgaaaccctgtctctactaaaaatacaaaaaattagccaggcgtggtggcaggcgcctgtagtcccagctactcgggaggctgaggcaggagaatggcatgaacccgaaaggcggagcttgcagtgagctgagatcacgccactgcactccagcctgggtgacagagtgacactccgtctcaaaaaaaaaaaaaagagtacctggaatattttgtcaggcaacatattaaatgttcttttttttttttttttttttttgagatggagtttcacacttgtcgctcaggctagaatgcagtggtgtgatcttggctcactgcaacctccgcctcccaggttcacgagattctcctgcctcagcctcccaagtagctgggattacaggcacgtgccaccacgcctggctaatttttgtatttttagtagagatggggtttcaccacgttggccaggctggtcttgaacgcctgatctcaggtgatccgccttccttgtcctcccaaagtgctgggattacaggcatgagccactgcgcacagccaacatattaaatattctaactgaagtgcttattaagggttcccctgtgaatattgattaaatatattttggacccgtaagattgtatcactttgcaaaggtagggaactttgtagctttaagcatcaatgttgtaactgtagataaaatggaaccatctgacctgaaactacaaatgactcatgacttagaactgggatatcatatttaatgaaaagatatttttcattaaattatgaaatataatattaatatgtacttatttagattacgttttaactgagctttaaaatattgaatatgtacctgattggaatcagggcaaatggctaagttgattttgaaatctccattgcatgtttttcatgggaatttgtagctcatttaaaatatgtcgaggaagtcatgaaattggtgaagcgaattcgctaattattgtcttaatagcttcaatgtgtttttcctgtgatggatccttccactaaccctgtttcagtttactcttcagaaaaatgctaaacttctaaagttattgccaataatattatttttagttttgtgatttgaaacattgaaagtttacattttttttttcctttggggatgacggatcttatgataaccatcctcagaagtgagggttaatatgtctttgtgtgcatgtgtttagcctgtgaatgccatgtgaaaggctcccattctgccgtgtgccatcttgagaccgggctctgtgactgcaaaccaaacgtgactggacagcagtgtgaccagtgcttggtaagatgcatgtgactaattgacaccttagccttggtacagaggcgattgaatccatgactcagaaggagctaagtccccaagtgtattagtttgttctcacactgctatagagatactacccaagactggggaatttatcaacaaaggaggtttgattgactcacagtttcgcatggttggggaggcctcaggaaacttacaatcatggtggaaggggaagcaggcaccttctttacaaggcagcaggagagagtaactgtcaacacttataaaatcatcagatctcatgagaattcactatcaccagaacagcatggggagctgcccctatgatcaaatcacctctctcctttgacacatggggattacaattcgatttgagatttgggtggggacacagagtcaaaccatgtcataaagtgtggctgacaagtgccgtgcctgtctagagagtggatgtttgctataaagggatggggatggtgtcatgaatactttatgattctatgaaataccctgtgtgtgttctggaacatactaatatgaggagtcatttattaaaacgtatgttggtttccactttctccccctttggtgaaacagcatggctattatgggctggactcaggccatggctgccggccctgcaactgcagcgtggcaggctccgtgtcagatggctgcacggatgaaggccagtgtcactgtgtcccaggtgtggcagggaaaaggtgtgacaggtgtgcccatggcttctacgcctaccaggatggtagctgtacacgtaagccttgatttccttgtttgagactttgtagtcattcccagagctttccttgggccctccctctacttccaactaattttggttaagtgcctttactttttctcttctttccctggaggatttcataccttttttctggtttctggtccctatcagggtacaagcctaagttttggtcatggctctgccgcctactaattgtgggagcttagattcattacttaactttgcttggcctcagtttcctcatctgtaaaatggggatgctaatgagaatctgcattgagaagttagtgtaagtgttctatataaagtcctcagcatggcattgggcctgcagtaagtgcttagtaaatattggctccctctgtgatcacctagtgagggctttttcactcttttctctatttcccctgtcctgtccccatttccccgcttccctcagcatctcctgagatggagggccggctacctccatgagacatggaggggtcttgggaattgtgaggcgtcttttaggagtgagaagagtggcttggactcttaataaaagggaaataacagcatcagctcttagccctttaatgacatcacccagatctgtaacccagcattcatctttatttcagcctgtgactgcccacacactcagaatacctgcgacccagaaactggagagtgtgtctgcccccctcacacacagggtgtgaagtgtgaagaatgtgaggatgggcactggggctacgatgcggaggtggggtgccaggtgagcactgtcatccacgctcttgcttaactgagagttgctttgctgtagcaagtttcaggcctgttcttctatatattttctggactttaatctgttgaatagctttgtgaatttaaaaaaaaaaaaaaaactcaatgtgggccaggcacagtggctcacacctgtaatcactgcactttgggagactgaggcaggaggatcgtttgaagccaggaattcaagaccagcctgggcaacaaagcaagaccctgtctttgcaaaaaataacgattaaaaaaaaatttagcctggtgtggtggcacacgcctgtggtctcagctacttgggagactgaggcaggaggatcacttgagcctagggattcaaggctgtagtgagctgtgatggcaacactgcacttcagcctgaacaacagagaaagactctatcttaaaaatcaaaaacaaaaacaatacaccttaatgcagatgataggaatcaaagtggaagacaggacacccttaagacaccttattctaggttttcttcaagaacctagttgttgcattgatggttagaaaatccaaaaaatggctgggtgcggtggctcacgcctgtcatcccagcactttgggagaccgaggtgggcagatcacaaggtcaggagattgagaccatcctggctaacacggtgaaaccccgtctctactaaaaatacaaaaaaaattagctgggcgtggtgatgggcgcctgtagtcccagctactcaggaggctgaggcaggagaacgacgtgaacccgggaggcggagcttgcagtgagccgatatcgggccactgcattccagcctgggcaacagagcaagactctgtctcagaaaaaaaagaaaagaaaagaaaatccaaaaaatatttgagtgtcctttaataaatattgtgcaatgtatactatcttccaagagaaagtaataaatcactttattgggggtttatgtccaaaccatgaggcctccagttttctatgtagccttcttcagttaaatttgggtatagtttgtgttttggaaacaagaggaaattactttttttttttttttaattgagacaggatcttactctgtcacccaggctggagtgcagtgacaccatcaaagctcactgtatcctcaaagctcactgtatccttgacctcttgggctcaagcaatcctcccgcttcaggcccccaagtggctgggactacaggcatgtgctatcacgcccagctaattttttgattatttgtagagacgggggtctcactatgttgtccaggctggtctcaaactcctgggctcaagtgatcttcccacctctgtatcccaaagtgccataattgcaggcgtgaaccactgtgcctggcctgatttctacagtaatttcgttagacttgttttgacctagtagatttaatttcagttcacaattctggccccgtgcgcatgtgccactaagatgcacagatttccggcaacacaatgcctgtctcctgttggcacatggcaacgtgaatccatgcagcaatagcaagagagagatggttcatttgtagaacttccccacatgtagtgttttcctgtaattcaaatatgtgtgcatttggaagcatcaaatctgcctttttaattgagttggttttcccttctctcaggcctgcaattgcagtctcgtggggtcgactcatcatcggtgcgatgtggtcaccggccattgccagtgcaagtcaaaatttggtggccgggcctgcgatcagtgttccttgggttacagagactttcccgactgtgttccctgtgactgtgacctgagggggacgtcgggggacgcctgcaacctggagcagggtctctgcggctgtgtggaggaaaccggggcctgcccttgcaaggtatttaccatccatcctcctctttcatcctgtctctggctcctcatcatgactcctgggctttgactacttacctaagcagccaggttttggatgcttttcctagtgagttcacactcccttccgcatctgagttcaaagtctcttatgctcctctagagtgacggatgatttttgaaattgaatttttactgttactagtgtcagttgatggaactgatttgaaaactgccctgaagttttaatcatatatcccagaggctgagtggctgcgtatcttgagtatgcaggtgaggtgggtttctcagggcttcgggatttgtgatgtgatccctgtgaggttattgggctcccgtatgtgctggccacattgaaggaaatcggggtttattattttcccaagaggtaagacttcaatgtcattataagttttgtgtgtttccgttagttttcccaatgtgctttgctattaggaggtcagagccacctcctctggtccttttcccatgggtggtgagatgggagccctctggcttgatgatggtaatgagctgatgggtgactggagataggaaggaaaactcatgtacatatcatggcctgggagtaatggaagcatcagtctccccgttttcggccttatttatttatttagagacagagtcttgctctgtctctcaggctggagtgcagtggcacaatctcggctcactgcaacctccgcctcccgggttcaagcaattctcctgcctcagcctcccgagtagctgggactagaggtgcccaccaccacgcctggctaaatttttgtatttttggtagagacggggtttcaccatattggccaggctggtctcgaactcctgacctcaggtgatccctctgcctcaacctcccaaagtgctgggattacaggtgtgaaccaccgtgcccagactctgccacatcttatgataacagctgtgatgatagacgagtagagcagcaggccttgtcttaataatcacctgggccaagcacggtggctcatacctgtaatcccagcactttggaaggctgaggtgggtgaatcacttgaggtcaggagttcgagaccagcctggccaacatggcgaaaccccatctctactaaaaatacaaaattagctgggcatggtggcaggcgcctgtagtcccagctactcgggaggctgaggcaggagaatcgcttgaacccggggggtggaggttgcagtgagccaagattgtgccactgcactccagcctgggtgacagagcgagactctgtcttaaataataataataataataataatataataataataataataatatttatcacctggccggtggctctcacacccagggatcatcagaatcacctggagactcgaggcggcttccagagttgtctcgggacattctcatcagggactctgtattttccaaacacttccaagatgattctgttaatcatctgtgtttgagaatcactgattggatctttgagaaaactgacactcagaaagctccgggcctggctagaggaaactaatgtttgtgcatctataattatgtttaaaattatgtttgtgctctattttgtctctgtttgttcagaaatcacatctcttttttaggcaaaaacgagtcctttatttgctcccctgtaggaaaatgtctttggtcctcagtgcaacgaatgtcgagagggcaccttcgctctccgcgcagacaaccccctgggctgcagcccgtgcttctgctccgggctgtcccacctctgctcagagctggaggactacgtgaggaccccagtaagtcacacacagcgaaagtgttctgcttctaaccccactcccctgggaggtgggtgggggtgggaaacacagccaagtgttcacattaaattttgctcttatggcatccaaaattctaggaagctaatttgggttagaacaggaatcagagctcagcttctgctggccgaggaagtaaatggagcttgaactaaaggctgtccatgttgttccttagctaatctatgaaaagctttcattggagagaagatagaactgcaaaatctcagccgtcttctgcatatcattgaacgtttccccagcgtagcaacagtttggccctaaatggcagtagtttaaagcactttcagttcattttcttccagatgtttagtttaaaggaaaagtctttactgtttctgttttaataatgaagctgtttcatctgtgaaacaatgatggaatctaaagaatgaaactggagtggaaagttcgcattttgaagtgcactttcccctcctttcgtggtttaggtaacgctgggctccgatcagcctcttctgcgtgtggtttctcagagtaacttgaggggcacgaccgagggggtttactaccaggcccccgacttcctgctggatgccgccaccgtccggcagcacatccgtgcagagccgttttactggcggctgccgcagcagttccaaggagaccaggtgaggtgcacgcccagccgagagccagtcggtgcttcctaggatatacagaaattgtttaaaatcaccatagtctgggccggcctgtcatttaaagaagtagttattaatttcctcttttaagtgggatcagagaagtttaatgctcataaaagtctcctcaaatatatggttccttaaaatttttcattaattttaaaagttttttaagttcacgttatattaatttggttcttcctaaagcagtcattcaacagacatatacagtcatgtgtcacttaacaatggagagacattctaggggaatgtgtcattaggtgcgaaagttattattataatctcatgagaccatggtcgtatatgtggtttgtcattgactgaaatatcattacgtggtatgggacccactgtgtttactgatatgctcttggtacaaacctaggtgctatggcctgggagtcccttttcaagaaattatcactcatttggggggaaaaaactactataaaagatcatgaaaggcatcacttggatttttgtttatataaacattggagtctgtgtgtgaattcaccctgatctttacaatttgcaaatatgcacccagtgctcctggagatagagaaatttttaatctaaaggagcttgaaaataatttgcatcactaccacattgatttgttattttggagctcacttttgtttgttttctcgaaaggaactatataacttaggtcaacttaataatccataattaaatggaattagaaggaagcaaattccagacaacaaatttcacccatgtgatgtatttttaagatacaagatttctctcttatggtggcagtcttgcaataaaatgtttttgaatgaaagctttgtcagagaagtaaacaacactttattatttgatagctcatggcctatggtggcaaactgaagtacagcgtggccttctattctttggatggcgtcggcacctccaattttgagcctcaagttctcatcaaaggtggtcggatcagaaagcaagtcatttacatggatgcaccagccccagagaatggagtgagacaggaacaagaagtagcaatgagagaggtgataatgggatcttttcatagaagttccttaaagacattgactttgctatggatgtagtgaaagatgaaagccattaataagagaatgagcagccaggtacggtggctcacacctgtaatcccaccactttgagaagccgaggtgggtggatcacctgaggtcaggagtttgagaccagcctgtccaacatgatgaatccccgtctctactaaaaatataaaaattagccaggcatggtggcacacacctgtagtcccagctacttgggaggctgaggcaggagaatctcttgaacccaggaggcggaggttgcagtgagccgagattgtgccactgtactccagcttgtgcgacagagagaccgagcaagaagaccctgggatcaaaattccagtgagattagcaagatctccaaaaacagtttgaatttcaaattctcaagaaatgtatattagttttatgtcaatttagtgggcactgcatcttaaattctttatcttggcgtactattttcaacctgcatagagatagtggtacaggagactttggacttgctcagatttgggaagtgtttattcttccagcagatgtttactggatgtttgctgtgtggctggcactgccttaggtaatgcatatctattgataatggaactgacactgcgcctgtccatggaggtttcaggaggtctttgtcagttacactcagtggcatgcacagaacatggctcatttctggagaaatttataaaagaatttattctttataagttttatgcctgtcagaatttggcctctgagcttaattgaatgtgtttctcattctacagaatttttggaaatattttaactctgtttctgaaaaacctgtcacgcgagaggattttatgtctgtcctcagcgatattgagtacatcctcatcaaggcatcgtatggtcaaggattacagcagagcaggtacttggagcttctagaattttgaccgttattttcatatttgaaagcaaactgaaagaatttgactcacttcacttccattacctactatttttattaatccatgtagttcagttccttaccaaaacattgttaaatattaatatcattatggaatgtgcgaattataacttaaagtatccacctagcatgctaatgtcgatataaaatataaggacataatgttggaatcttagctgaagataaaatgcaaaaaaaacaattgctgtttctgcacatgaaaactgaaatgcccatgtcttcgtagtgatgtataaagaatgctgtcacctactcatctcatactttagcccaaaaagaaagccattaggtcttggccaaatcagcacttcaagaggtcttttaggtgtacttgtgtcacattatttttaaattctaaaatgtctaaagtgtgtcatgacagttagtaatgtgctttaacacacttcacttacaatcacaagcaggaactactccaaacagggaagaaagctctggtttcatatatatgcaagtgttaggtcatgtgctatgtttctagaaagtttttcaaatgttagcgtttcctctcttaacatgatggctgcacagaatctcagacatttcaatggaggttggcagaaaggctgaaaagctgcacccagaagaagaggttgcatctcttttagagaattgtgtctgtcctcctggcactgtgggattctcatgtcaggtacggagactctagtcgaaatctatttcctgggtttgagttgaaatgtgcttgttacagcaactcccagagatgaacagaacttatgtgtatctactatatcatttttttctctttttgaattaaaaagaaattaattttggtaaaatgtacataacaaaatcttccatcttaaccattcttcagggtacagtttagttgtgttaagtacagtcacgttgttgtacaactgtcaccactatcatcctcagaactttttatcatccgaaacgcaaactctgcactcattaaacactagctccccatttcctctctccccagtgccccaaaaccaccattctccttttggtctctatgtatttgaccactctatggccctcttatatgatatatatatatgcatggcacatgcctgtaatcccagctactcaggaggctgaggcaggagaatcacttgaacctgggaggtgaaggctgcagtgagccgagatcgtgccattgcactccagcctgagtgacagagagatactccgtctcaaaaataaataaataaataaataaataaataaataaaagtggagtaatacagaacttgtctttttgcgaatggcttgtttcacttagcataatgtcctcaaggctcatccatgttgtagcatgtgtcagaatttccctcctttttaaggctgaataatattccattgtacatacatgccacattttgcttattcgttaatctgtcagtgaataaacttgggtggcttccccatcttggctattgtgaataatgccgctatgaacataggggttcaaatatctctttgagattctgcttccagttcttttggttgtgtacccaaaagtggacttgcagaatcatatggtacttgtattttccatctttggagggatggaaatggtatagctactggtttttcctgtgccattttccattctcaccagcagtatacaaggtccagtttctcaccaatacttgttagttttttttttttttttgatagttgataccctaacaggtgtgcggtggcatcaccttgtgttttttcatttgcatttctctgatagagatgtcgaacttcttttcacatacctgttggccatttgtatgtctcctttggagaagtgtctattcaagtccttcactcactcattaatcagacttttttgtcctcccttttgcaccccctcaggactgcgcccctgggtaccacagagggaagctcccagcagggagtgacaggggaccacgccctctggttgctccttgtgttccctgcagttgcaacaaccacagtgacacctgtgaccccaacaccgggaagtgtctggtatgctggtttgtgggggtgcttgcctgagtttagaagtaaagtggacgctgagtgtcagatttccggtctaagtcatagccgtgccttggtttagtgagaggttaaatttagctaaatataaaatataaacctatttccttgaggacggcatagcttagtggttctgaccttatcagtggaaattcttttataaattttcctttcttgatgaatttatctgtgggcatcaatttgggaattatagtcgtgcaccaaataatgacattttcatcaacaacagatcacatataggacagtggtctgataagactataatactgtgtttttactgtaccttttctatgttagttatagttagatgcacaaatatttcctgttgtgttgcaactgcctacagtattcagtacggtaacatgctggacaggtttgtggcccaggagcaataggctctaccatatggcctaggcgtgtagtaggctgtgccatctaggtttgtataagtgcactctatgacgttcacaccgtgacgaaatcagctagggatgcatttctcaggcagtatccccatctttaagtgatggatgactgtagttgcatgccttgtttttaattgcagtactggttgccgtagtcaaaatagatgagaactgtatacgatgaagtttgggggctcacgtgggaattttaaaataagttaatgccagtgttgaaaatgtatttctctgtgtaaagtattgccctctccttgcattttttaaaaaaatgcatattctctaggggatgataacagcacattattcacatgttagtgtgtgtttgcttctcagccaccttctcctaggccaagattggtctcggggacacatggagagctctgaccactgtaaacgactaagcggcccagacagaagcctcgcagccctgaccgaggacaaattcctgtgtccatgatttagcttaagccaatgaggcagataacaaaataatgtgatattcgtttcctactcctgaagcctcatgctttacagtcactcaggtggaaacattgattactaattgttccaagattaactcgccttgggtaaaataatgcattgaagggaaatgagctgcccaccaaggacacacccgaagcctcggagatcctgggtgtggcccaatcacaaggaaacactggagccaaaacagaggaattaggactgcaggctcccaacctgcctcccgccacattttgattctggttttccctctttttgacaattcctgtcactgaaacccattataaacaaaaaatggtgtctgggcttggaggatgggatttcagggttgcagtggtccttctattcttgtcagagtcccttcacatttttttattattattatttttttcaagatggaggcttgctctgtcacccaggctggagtacaatggcgcagtcagctcactgcaacatctgcctcttggcttcaagcaattctcctgctcagcctcctgagtagctgagattacaggcgcctgccaccacacccagctaatttttgtatttttagtagaggcagggtttcaccatgttggccaggctggtttcgaactcctgacctccaatgatccacctgccttggcctcccaaggtgctgggattacaggcatgagccatcacgcccggctgtcccttcagatattaagtctgaactatagcagccatgccaggcagtaatttagtgtacattttacacacctgcaacaatggggagctcactcccaaaacagctctgctcatctttgggcagctctgattctttctaagccagtgcccctgaccatgcatctgttggtgcagttttattctttggagctgttgagataaaccatgagttcagattattcatgaaaagtgatgggatcttaacagataccttgtgaaactacttgatcaaatccctctttcccatgtccaaaggccctgaatcttcagccctccaagtcacgtaccctcacatgcctggaggccagatggagtggtcgtgggtccgttcaccagcctgtggtgtgcatgtcactgtctgtcttcggtatcctgccctgagcctaacgcctttgctcccagagtcagtgggagcttccctccttaactcgaggtgctgtgtctccatggcccagcctggacagggtagtcatacctgccctgtcactgctgcctcacggcattgactagacacaagacccttgaactcttcccatcaatatagcgcctcagtcccttcttccttgctctttgagctcaggaccttcccttccatcctcagtttttcaaatccttttgtggtttagtgcagttcatttcccttcaacataatctcctaagcactccccctgtgcttattgtacaggtagatatgaagacctttttggatctgattttgtcattagtatataggatgttcaggtcactgagcatttggtgttatcataaaaatgattggggccgggcgcagtggctcacgcctgtaataccaacactttgggaggccaaggtgggcggatcacctggggctgggagtttgagaccagcctgaccaacatggagaaaccccatctctactaaaaatacaaaattagccaggcgtggtggctcatgcatgtaatcccagctgctcgggaggctggggcagaagaatcacttgaacccaggaggcagaggttgcggtgagctgagatcgccccattacactccagcctgggcaacaggagcgaaactccacctcaaaaaaaaaagtgattgattggaagtatgccttggaaggggctggggagactgaggacaagggcggtagcctgggagctcctcgtcctggttacccactccctaccaccgccttctgggagatacgactgaacctttttacatcagtgaaatattggcaggcattctctgtgaatttcccatagcaactaattcagcccacactttggttctcattagggggtccttgtttccctgccactcttggggcagcttgtctttgcttctctagggagcccacagtctgtcgtaagtcagagggagttggtgttagccatggaaaacctgaaaatcttcaattctctctcatcatctaatatttattccttgtcaggtttaggccatgccattaacacttttacttttcaagagagagattacaaattttacttctacagagagatgagtttgagaggtcaggtagatcccagtaaaatttatcctcatcagggaaaaaaataggaatagaactttaaaatgaaaaatactagaattttaaaaacatttaaatgaacttaaaatagtcctttttaacatgtaacaagatgtctttctgtatcacctctcactgccaaggataaaagtgtgagtcagcctgggagtttgctcaggtgttcctcactgatcctggaaacctattcagctgcatcagacatggaatcttgtgcccagtggctgagtaaatagagatgaattgagcaaatgccaatttcaaattggaatcagatggcaagaactgcttgttcttttagctttaaaaatgtgtacctttttggccgggcacggtggctcacgcctgtaatcccagcactttgggaggccgaggcgggcagatcacaaggtcaggagatcgagaccatcctggctaacacagtgaaatcctgtctctactaaaaataaaaataaaaataaaattagccggttgtggtggtgggcacctgtagtcccggctactcgggaggctgaggcaggagaatggcgtgaacccgggaggtggagctcacagtgagccgagataatgcctctgcactctggcctgggtgacagagcgagactctgtctcaaaaaaaaaaaaacaaccaaaataagtgtaccttttttaatagcaagaccgtaggtccaaaggatgatataaaatttaactggaaatgccacatggggtggctcgtgcatgtcgtcccagctacttaggaggccaaggcaggaggatcacctgaggccaggagtttgagaccagcctgggcaacatagcaagaccccctacctgtacaaaaaagttaaaagttagacaaacatggtggcgtgtgcctctggtcccagctactcgagaggctgaggcaggagaatcacttgagcctgggaggtcaaagctacagtgagctatgattgcaccactgcactctagcctgggcaacacagggagacctcgtccttaaaaaaaaaaaagaaagaaaaaaattaactggaagttagttgttggttgcagtaatctatcagtggtgctctaaaaccatgagttttcttccctcattgtctatttcctaaatcatctatccattcttcaactccttacatgtggttgttgaaccctgactgtgtgcaaaactggtgcttcaaattgttttttggggcactaaatattttaaatctgtgttttaaggttctgcaaactgcttttagggctcctatgtctattttccttaagaagaatgtactagtaatttcttggctgtagtggatgaatgcagccttaggatgaatgaaagccacagagcgggaaatgttttcaggattttaagaatatggaggaaaatgctcccctttcctgaagaatatttttaaaagctagctgatataaaacgtggcagtgcttagctattaccagataagaatgatttctaacaatttcccattttttcccccttcctttaaatgtgggctcccagaactgtggcgataacacagcaggtgaccattgtgatgtgtgtacttctggctactacgggaaggtgactggctcagcaagtgactgtgctctgtgtgcctgtcctcacagccctcctgccaggtgagtccccacaggggcagctggcatgctgggctgcccagggctgcttccagttcagcctcattttcaagggtctctgagtggtctgttgttaatgaatattctccattggttgcaaaaggctaattttaagaaaaggtgttcattctcaaaagcattggaagagaatcttttcaaaagcaaagtatctgttttggtattggatgtttggatggaagcaattaaagaaaggacttttaggttttgttttttaagactcattttagcccacagcatatgtatccaatctgcatggagataaattgctattaattttattgataatgatacaaaagaacccaattaccatttaagggaatggggttagagtttatataagggaatggggttagagtttatataagctggtgcctaagtgctgaaataccacatggtgataaaattgggactagtttctaccttgtacttatgatgcttgtacagaattacctgaatgcaaaagggaaccagaaattttaagtgggaattagaatatcaaagaatcctctttggatcaaatgaaaattataactcatcaataatattttattattgcttagaatatttggcaaggtattgaacatacaaagatcaaatgttaactcttggtatactgcaatgaagtattccttttaatatttgtctgaatcttctgttttttattgcctccaagtaaatgatgcctgatggtgagtaccaaatgagaggcactatgtacacttcccttgcaagctatgaagcatcctaaaatttgttgttactagtgcttattttttatattaaatgtatatatataaattttgacttgtcaattccacttctgtagtctgtgctatagaaatacttgcatgtgtgtgtaaagatggatgtgtttttgcattgctttttactcatgaggaatagggggaaaacggaaatatctacttacggggaattgattatatacattgtgttacattcctagagtgaaatattttacaaacacggagaaaagaataaggtatatctgtaggcacagaattggagaaatggccaattgaagtatgtaattgaatatggagtgtgatgccattttggaaaaaattcatatccacgtctattcatacccatattataggtggctatatatgtgcccagagaagtattgggaaggacattctaccctactactttgcacgtttctgtgctgtttgaatattttacttctgcaatcataaaaaggttataaacatccccaaagtccgcattaataaattaaagtttgtgctatcaggaagagattgtcaggttgtgaacattcttgtgtgctctgaatctcagatgccctaaaacacacgctttattttctacatattttgtttccactgaagtctatccctttactattttaaggaggaaaaagagtcggaagtggtatggggctgataactgacgctggaaacttcatcttgctaacgaaaaggaaccagacttggctctaactggttttgttttttattgttgtctccagtagtttgcatgcacccagctcagcctctagatggcacattggtaatttaaaacgtgaaggcagagggtagaggatgttgagaaaaaggagtaaaacaaaagcagaaatccatgaatgaggagatcaaatcccagtcgatgattaaactttgagaggctctgtcattttgcttatggcagcctaccacataactccctgcctgcctttaggtgcatccgttctccagttctgccttatttccttgcctttgcctccctggctttccttcctcgcctttcgttacagtcaataaagttcttttcgtcagcgtgtgttcagccatcttccctctgctgtttttcatgcttgctcatagttgtttcagctctcttaccaccttatcacttagtaagcaaagaccctttttccttgggacactctcttgttgggtggccaattagtgataatccctaaggtcagtcttcttccacttaacattcacatgattgtccctggacagggtcttatgaatgtcttttggatacaagatgtgtgtgcacttactgattacttttattttccttctttttgccaggtagattgtaagctctaaaaagctatgtgtaatcacataactttgagaccagtatggtgtatcctaagagtaatgaataagtaccttaaggaaagatggaaattgtatatctgaaaattcaaaaagaaattcttttcctccagttttagtcccacttgtgtcttggaaggggaccacgatttccgttgtgacgcctgtctcctgggctatgaaggaaaacactgtgaaaggtacatgggtggattgtcatgtggaaatccctgggcactctgtttcttttataaggtattgggcatatttactatagtaatctgggagccattatcaattatcagtttggatgtgcttgattgaaataagacctcattactgttccagaacaagttttcccaaggtgaatggatctgtgctttgcatttcatttggcggaaatgattactgtcgcaagttagaagctggtattgaccatcctgtctgcacctatgtcccttcctttctgtaggtgctcctcaagctattatgggaaccctcaaacaccaggtggcagttgccagaagtgtgactgcaacccgcacggctctgtccacggtgactgtgaccgcacatctgggcagtgcgtttgcaggctgggggcctcggggctccggtgcgatgagtgtgaaccgaggcacattctgatggaaacagattgtgtttgtgagtatttctcctctaaatgtgtaaagatggtttttcctcccaaatgtgtcgggaaagaagtggtgacggcacgctaaagtgtctgcagaataaaaacatcctattttattttcattttcttattttctaagcatagatcactgttgcatctgctgaactgaacctttcatcatgtgttttccagctgaggcaggaggttctaagatagcagtttattcctctggcactcagagcagcacagtgatttcaactttctcctttagtggcattaatatttcctttagtggagccaggagtgatttagtgcaggagaggaaacagctttgtggggttgtcatttgtgttaccccaatttcatgatagcttccactcgtgactatcatggacttaaaaaaaaaacaaaaacaaaaaaatggagtcttgctctgtcccccaggctggagtgcagtagcacaatctcggcttattgcaacctccgcctcctggactcaagtgattcctctgcctcagcctcccgagtagctgggatcacaggtgtccaccaccttgcctggctaatttttgtatttttagtagagacagggtttcaccatgttggccaggctggtcttgaactcctgacctcaggcaatccgcctgccttggcctcccaaaattctgggattacaggcatgaaccaccatgcccggcctgtcgtgggcttttgtaaactttttttccagttctgatttattctaccagcaagtgcatgagatagtcagcttgggatgtcttctcaggggttaatggggaagatagggaggcctgttaggaccatggcattggaggtcttttttgctttgacttttgtgtgggttataagcacaaacacccccactattctctccagtgtccttcacttgtacttgtgaaagatgcatttgcaaactgcctgaggaggtgacagagcaggctgtggaagggaatgctgggattcagtgcagtgggtcctagttaaagatgagccaggcagcataaagatgggggcagaagaatgaaatgtgtgccataactccctgcctgtctttaggtgcatccgttctccagttctgccttacttccttgcctttgcttccctggcttgccttcctcgcctttcattacagtcaataaagttcttttcgtcagcgtgtgttcacccctcttccccctgctgtttttcatgcttgctcatagttgtttcaactctcttaccaccttatcacttagtaagcaaagacccttttgcttactgggcgccactcttggcctcagctgtttctttctgtgtgacctctgggaagttacttatctgatctgagtcttggcgtcatcattgaataggggcctagcacttcctgccgtgccacccatggcacagttggagtgagaatgagatcagatgtggtgcacggggtcttggagtgtactctgaccgcatgtgtcattttcacaaaacaacttgcgcaactccatgaaaaaatgggcagaccacatcgcattaactttaactctcctttttaaaaatttgtcttgtagcctgtgatgatgagtgtgtaggtgtgctgctgaatgacttggatgagattggtgatgccgttctttctctgaacctcactggcattatccctgtcccatatggaattttgtcaaacctggaaaatacaactaaatatctccaggtaggtactggaaatacagagatgaacagacacttgtatcattaagggatatagtcattgggaatggtgggagtcattccatgtgtcctccccacattgtgagagcccaacttccatcagcccctgcgggcaggtgtccagtctttccttgactgtgaccagtgacaggcacttacttacttatctcacacgctagcttgtttcacggtgggacagctctcatcatttcagtgctctctggaggactcctcatcaatgctgccctctgtggccctcattctgccttttgggataaggccaagtccacttgctcttctgtaagacaactttgggtatttgcaaacagctgccctattagaaaagcagaaaataggccaggcacggtggctcacacctgtaatcccagcatcccagcactttggggggccaaggcgggtggatcacgaggtcaagagatcgagaccatcctggccaacgtggtgaaaccccatctctaccaaaaatacaaaaattagctggatgtggtggcgcgtgcctgtagtcccagctacctgggaggctgaggcaggagaattgcttgaacctgggaggtggaggttgcagtgagccgagatcacaccactgcactccagcctggcgacagagcaagactccatctcagaaaaagaaaaagaaaaagaaaaagagaagaaaagcagaaaataaatctgaacagtatcttctttaaggtatattatttttaaagtgtattattcttcactgcactaaagttgcagggcacaaaatctctcctccctggaaggctacattaaatgtctggcagtaaatcatagttttatgttttcatcaacagagcctgggtcaaaaaagggtgaggagttaagaaattaacttagtagacagcatcctactatagcacttatttatttttattatcttatttatttattttattatttttttgagacagggtctccctcagtcacccaggttggcatgcagtggcgcagtcatggcccactgcagccttaacctccatagctcaagggatcctcctgccttagcctcccaagtagctgagactacaggcacacaccaccatgcctggctagttcttttatttttatttttaatagagatgagctctcactatgttgtgcaggctggtcttgaactcctaagctcaagagaacctcccaccttgacctctcaaatttctgggattataggcatgagctaccacgcccgacctacttttaattctaattggaaaacagtgtgattcttaaattttgctttatatatgcgttagaatttgacataatctatgcagtgcaccaggtagcaataaaagggatggccattcctaaatgccttttcttagataagagttttcctcaaacttaggacttccttaggtgtgtgcgtgtgtttatgtgtgcgctgggatggggctggttcttgaatccgtcttgatttgcagtggtcttttctctataatggtagttcagaaaggttagggacctctaagagatgtttttatgttatactttcctcaaacgtcacaaagtgtttttgaaaaatgagagcttttacctctataaaaaaaagaatatttaacttttttttccaatcactatatacacgatcagtataatatctgccagtcttggtcccagggatataactattttatatatatcaaataagacaaatatttgatttaaattttaactcattttgaatgatttgctctaaataaaccacttgtccgttttctttaaataactttttgtgtttatgtaaagtattcatcaagttttaaggttgaaataaaattatacaagaaattagaaggctgttggcataaattaagcactttatttttctttatttttagtatttataaagtctttctttattgaattcttttgtagtttagcctaaaaggcatttttttcttaggtgttgcaattatagttaaatttgtgtgactctgctattgagataaagccagacttttatctgagaattgcagcagtatcagattctgctgaacacaacagattttaaatttatatctatatcagaaatataatgcaaaggatggcagtgtagaatcatgtcgctataatcgaaacctaagtaaatgtgatccatttttttttaaaatgacagttccaaggaaagaagaatttctttctgtgaacaaaaaagaaatgcaagtgcttcttagttaagaatcagaacattttacttcgaagcattgtaatttgtttcctccattcttcctaggaatctttattaaaagaaaatatgcaaaaggacctgggaaaaattaagcttgaaggtgttgcagaagaaacggacaacctgcaaaagaaggtaaattctttccataaccaaccaaccttcctcctggtccctcccatcagccctcctgagcagttgccttggggctgtctggaaggttctgattagatcatgccagcctcttcctcccacgagctgtgctccaggtacttaatcatcaaattggttttgaccctgccagtttctgtggtttagtgggaaaaggctcccgacttaatgtctgttgtcatctctgctgaggacagagttgggcagtctcttggctctgactttcattttctcctctgaaacaaaggtggggcggggatgaaaagattgctgaggtttcttccttctcctaaattcattcagtaacgaagtacacggtgagcccaaaagcacggactgaacatcagtaatgctctctgcagcttgctgggtggagcagggagggcacagacctcatgatgaggcatctgtgcaaacttcaggcttcaggctggggtggttctgattttagggccctgaatggcaagtgagcttgtttttctgtcatcagggaattatttattctgtttagcctgtgccagaggaatggcatttagtgacctaaaaaagaatctccccttctgcagatggtgaggaaggattattgtcaaatttactgttttttcatttatgaattttgtatgtgtgtgtgtgtgtgtgtgtgtgtgtctgtactgtgatggtgtatctatacatatggatgtctaatctccatcaacacatgcacacatacacaaacatcaccctaggaagtatagtttggctcctgttaatttagaattaacgatgttttggaaagagttgaagggtttaagtttgggtttaagtacctcatcaagcaaacatttggttggaaataggctgattaaaataaattctctgtatccgttattctctttggtcttgactagaaaacaccaaactcagactgggttactctacattcttggaaattacaaacaacctttcctttaacaaagagtaaaaatcccagtagaaataacagctgaggacagctaagtgtcagcctctgggctgctgacttcctggctctcgtcttgtgtagttctcgtagcagccctgggaggtaagcgttgctgtttcccaagtgttacagacaatgcttggagatgtctgggcctgtccacagcctggagaatcaggtctaaaatcagcttgcctgactccgtgttcttaactcctagagactaacatctcataggccatacaaatcagtaaggtttactttctatattctgtatatttgggttttaaagtgaatcgagggccctcacagtatagccactaggagaatctgtagtttaatacacaattagcctgcttttaaaaacatacccatcttttcttatgctgagtgagttgtaaattatttcattaactacttagtccatttctaaccccaaaatattaagctcggcttgcatgataatgctcatctttactctatattctggaatatatgttgttgcttataagcggcaacagtggaatattacaacttgcgtattatttaaagtcaaactaattacttaaagtcaaactaacctgagactttatttttccaccagctcactaggatgttagcgagtacccaaaaggtgaatagggcaactgagagaatcttcaaggagagtcaagacctggccatagccattgagaggctgcagatgagcatcacaggtagtgtgggcagtgtctagtttgaagtatctgtgcttatctagtaagaagtcaccattgctttattaaacatatgaatagatgtatatctcttgcatcgggtttccggaaccagaggggctggaatagtttggggatcctgagatgtgcaaactttagtctttgactgagagttttagctttaaaaaaatgcatatttctttttttattttctgcattatgcctaaaacttagatcctaattctcaagccctgttatggtaaagttagtatggtagctctccatccatttgcccagaataggagctgacaggatttgggacttcagttaggtaccaagtatatccatcacattagaataatttaatcacttctcagttgggtgtgctgtggcttttagcatactattttcagttttctggctaccagaaacatatgatcgctcttctttttatattatagtgtaagggcttaaaaagtacagaatccaataaaaatcagactttatagggcaaaaggtaaggaaattattagaacaaagtatacttaataaaaaaagtaggatcaagcattggtggtttatttatgcagtaaatatttattgagaacatttatttttcatgtgcagatgtctctgccaggtacaaggaaatgctgaggttgacaccatgtccttgcctttagggagtttattggtgcatgagaagactttgaaatagaccagtaatcccaagttcatgaatgtttagttaggggatgtgcagagtacactgggatatgccaggtggcctggcctgacatggaggtccaactcagcttaggtaaacagagcagtcctcagcagagaagtttctaagttcttcacttggtactagccacttttgagaggcttattaaataattgatgaattttctccatagaaattatggaaaagacaactttaaatcagactttggatgaagatttcctactacccaattctactcttcagaacatgcaacagaatggtacatctttgctagaaatcatgcagataagagacttcacacagttgcaccaaaatgccacccttgaactcaagtaagtttctaattactgtgtgcaatgcaaccaagtagagagagaaacttgcacgctatctccaaaggagaaggaggcatcgtggaagaaaagtgctcactggaaatgaaatatcctaagagaggagaaggggccctgtggtcaagtaaatgaagagatgggtactgacccctccaaatatagaaaggtgtaatctgtgcagtcagtgtaatctatctttgtgctatcatgcggtagcttctgtccttttctgtgattccgggatgtttccacttagcacaaacagcatagcctcatggtactgtagatcaaggataaggcagtaaactctcatagaaaaaaatcgttggtggccacccataccatgaactctaagacaggtcaatgttatgccagaataattgagcttagttatataaaaaagtatagttacattgaaacccacgatgtgaagtgacacagagatcacaaagcattcttacatacagtcacaaggagtttggagtttcctttccagcttttatcttagcatttccacacaggtattacttgatatactagcacaggctgtctctctgcaggttgtaatgaatgtctgaagtgctgttataaatagttacatgatactttattaaaactctactctggacgttactatctaaactataatctaatgaaatgatatagtcatgtgagatatttaaactttaatattttgctattttaaattatgttgtgagggacttcttattcaaatgttttatatctttttctatattgaaatatcaaatatttatttatactgtatatatctcttctttttctgtatttcagattattttcagggtagatattaagaagtagaattattggctgggcgtggtggctcacgcatgtaatcccagcactttgggaggctgaggcgggcagatcatctgggatcaggagttcaaaaccagcctggccaacaaggcaaaacccgtctctactaaaaatacaaaaattagctgggcatggtggtagatgcctgtaatctcagctactcgggaggctgaggcaggagaattgcttgaacctgggtagcggaggttgcagtgaactgagatcatgccactgcactccagcctgggcgacagagcaagactccgtctcaaaaaaaaaaaaaaaaaaagaagaagaagtggaattatttagtcaaagaatttgtgttttgaggattcctaacatgcacttccaaataattttttttttatattttttaaaaacaatgttcactgccaccagcaacacactagagggttgggtatgtgtcttttttcatcatagagcataatttttgacgttgttgatttgttaggtgaaaaacaaaaggaggtgcttacagttggatggagtttggagagaggactagtaatctaattactagaataatagggcctggaaagggctctgagagaactaggatctaaaggccttgcgcagggggaatgagaggaggacgtggtcctgggagatgggcgtgagcagctgtctgtggagcccctcctctgtgccaggagagtgctggcttctcttctcacattgtgttctgtgatcatctcagtctttccaagtaggggagaacccagttgaggaaactgaggcccagggaatataagtaacttgccctatgttaagcccccgggacaatatgaaacctgaccacaaacctgaatctgtttgagtctaaaccctattattttcccacccagaacaaaaggaagtaccatttgagacccattccataaaagatgggcaggtggaatttggacagtcggagacatcgagggcctttcaggggcggggaaacgagatctaagtctagcataggtggagagccattgaacaagggaacactggagccaaagaagctcagctgaagtttgcatcgaatttgagaggcaatgggtagtggtgacagaagccaaggtgcgaacgttagtcctgcagccccgactgcacactgaggcttcagctgtgctcttctcgggcagctccaaccagggcttcccaggacctgcccaccctggaggcgatgcccctgggtggggctctgctccctaaccttcctcagccccccacacatctgagttggtggggagcatgtgaaggatggagattcccaggcccaccctgcagatcctagagaatcattttgtggggctctcccctcccaccgttacccttctgaggtcagttcattcattcattcattcagcaaagtgacctgaaccctggttacaagcattgtgccaggagttgggaacatacaggggaacaatagagccttttgcccactaggagctcctggtcaatttagggaaagtttattttctgaatatgcactttaaatacaataagaaagtttaaaatagaggtcaaattttcatctataggatgatgttagtatctaaaccacaatcacatgaaatgatatagtccttaatgacttgaacatgattaaccaccaaaaacaaaacaaaacaaaaaacccagcactcttcattagcttcttctagcaaaattgacagaggaaactggtgtttctcaagctatgtgcctctataacactagtgtcccatgaactcctgggcagattccttgaacaaatattaaccttcctaggatctgcaaggcaggcctgggactctccatccttaacaagctccccagcaactcagatgtgtggggggctgaggaaggttagggagtggagcccagccctggggcactgcctccagagtgcgtggttcctgggaagacctggttggagagacctgaaaggaggtgggtaggcagggccagcccccacccccacctgttcccctcagtgcctcctgaccctcccctattggcgagggcctctaggatccctttaatttgtaagttaaaatactactaaagagaccttttattttaaaaatcaagagtttaaaatgtattctctggcctccactttctgattttccatagataatccctatatatatgccatttcaaaatacatggattattttaggaattatctgctttttaattataattcttaaaacattggtggttcatgctgaagcatggcaattgtatagatgagaagtttagcacacagactgattacttttcatgctgggtcgggggtctccagaactaacaccacattcagagtttcaccaggacccccaggattcagcatataactgtacttacagctaagatttattaaggaagtccagccagatggaacaaaaggacacagcagagtctggagaaatccctgaagtcctctccccatgtgggatcccagagagcactcctcccccagcaagaaaaatgcagcaacatgtgtgtgatgtttctgcccagggaagcctgtcagagatgcagtatccagggattttgttggagctgtactggtaggcaccctctgcctagcacatagcaaaagtcgactcccagaaggaaagcaggtgttcagcataaaccatgttgcttgcacaaacagcccaggtagtgagctactcttagcagttagggatcagtgggaacgcagcccacctcgccagcaggcctttcagaggagagcagactccatccagcccgccacgttgactctttactgtacacttcggattattgtttgtagctgtttttcaaatgatttccatgctggtatctcagacctattaaaagattttttttttttttttttttttattgagacggagtctcctctgtctcccaggttggggttcagtggtgcgatcttagctcactgcagcttccgcctcccgggttcaagcgattctccctcctcagcctcctgagtagctgggattacgggcacctaccatcatgcccggctaatttttgtaattttgtatttttgtagagacagggtttcaccatgttggccaggctggtcttggactcctgacctcaggtgatctgcccgccttggcctcccaaagtgcggggattacaggcatgagccactgcgcccgaccaaagatatgtcattaaagaagcacattccaagacacagtgtctactaaggagagccaagttctgtactgcaggtcttctcaaagcttttagtacgctgacgcacatcagcagccccgtggaggatccggctcacttctttcaccctggaatatttgttcaaggaatctgcctggcagttcatgggacattggtgttgtagaggaacatagtttgagaaacaccagtttcctctgttaattttgctagaagaagctaatgaagtgctgagtggggtttttttgttgattaatcttgttcaagtcattgaggactatgtcatttcacctgattgtagtttagatagaagagtcatcttgtagatgaaaatttggcctctgttttgagctttcttttttctctttttgagacacggtctcactctgtcacccaggctggagtgcagtggcgcaatctcagctcactgcaacctccacctcccaggctcaagcgattttcccacctcagcctcctgggtagctgggactacaggcacgcaccaccatgcctggctaatttattttaaattttcttagagagatatcttatttaataataaggaataatagattcatgatcacacattagaaatatattgggtttatttgtgttttcttacgtatgtgttttagttcttgttgcctgctcataatgcaacgtctttattatcgttaaaaattatatcattaaaaattataagtgccgatgttattctaataatgtcagagttcaaatttataaccttgaaaaatgtttttggtcgtgtcttaacccagtgacctgacacctgtgaaagctgagggtgttttacagggcattttccatagaatttttcaaaattgtcctgacaaattaaaatgaagagttaataggatatactccaccactgcaaggatttgtagcatgaaattttattattctatgcagctataaattcaaaattgatttaaatcagcaatttgatggcatatttataaagacataggaaaaaaatcttttggtattctaaagcttgcatttatccatggtacaaatcatatctttttgtcaatttgaatttgaaagcttttatgaaatctgtttcttcttaactagctgcagaaaatccttttatcgtatatataaattggtaaattcttaacaaatcactgaatagctttctttcaatttcttgctgtattatatataatgaaagattgcagttcccatcaacacagaatgttgtcccaatttcctgaatccagattcatggagatgatcttttttaattccattactaaaatgtattagaaagtttaagtgttcggattcccacaaagcccactggacccaagtttaccaggaaatttggggaggtgggatttaatgagcttcatcatttataaaatcatcagagctgctgataaaagaagtaaagctttgggccgggcgcagtggcttacgcctgtaatcccagcactttgagaggccgaggtgggcaagtcacctgaggtcaggagtttgagactagcctggccaacaggtgaaacccaaaccccgtctctactaaaaaaaattagctgggcgtgatggcaggcaccttaatcccagctacttgggaggcagaggcaggagaatcgtttgaacatgggaggtggaggttgcagtgagctgagatcaagccattgcactcaaacctaggggacaagagcaagtcttctctcaaaaaataagaagtaaagctttgaaagcttcaagacttgtgcctgcttgtggtcatcctaaccggcttaacttgaaatacacatgagatgaaagatcaccgtgcctgtaaatttcagcaaactatatgggaacatggaacatcactgtgcacttatataagtaccatttacttcctgtcatgaataaatgtatctgtgagatgcaccactaaaaaaaaaaaaagacaatttgttaaggataaaatataaacctgccatacctgtagctatcttagaaaaattgtttccattcttaagaagttatgatgtatcacttacaatttcaaaaagagactaggcataaatacgtaaaaattttttccactattatttcagagataggagctttgttgttcatttacttactatgtgaaccattcatatttatcagggctgctgaagatttattgtcacaaattcaggaaaattaccagaagccgctggaagaattggaggtattgaaagaagcagcaagccacgtcctttcaaagcacaacaatgaactaaaggcggctgaggcgctcgtgagggaagctgaggcaaagatgcaggaaagcaaccacctgctgctcatggtcaatgctaatctgagagaattcagtgtgagtctcacttgctctctccttctcaattagaacaggtaacaaaatactccaacgtaagcaattaaaagtgagccctggcctggctgggtggctcacgcttgtaatcccagcactttgggaggccgaggcaggcagatcatgaggtcaagagatcgagaccatcctggccaacatggtgaaaccccggtctctactaaaaatacaaaaattagctgggcgtggtggcatgcgcctgtagtcccagctactcgggaggctgaggcagcagaatcgcttgaacttgggagatggaggttgtagtgagccgagatcatgccaccgcactccagcctggcaacagaatgagactccatctcaaaaaatgaaaataactttaaaataaaataaaagtgagtcccatgcactaacttctgcacgtagcattaggcaccaaaggtcagaagcagggttgcttttatgaagcacccttaaaatgccgtttctgctgcaggataaaaagctgcatgttcaagaagaacaaaatctgacctcagagctcattgtccaaggaagaggattgatagatgctgctgctgcacaaacagatgctgtacaagatgctctagaggtaaattacatctcagcacagccacagtacagtttttaaagaatcttcacacatcttttctatatgcacacatatctgttattaagtagatgtgcatatatttacaatattaatttctccatgtagcacttagaggatcaccaggataagctacttttatggtctgccaaaatcaggcaccacatagatgacctggtcatgcacatgtcccaaaggaacgcagtcgacctggtctacagagctgaggaccatgccgctgagttccagagactagcagatgttctgtacaggtaggaacacgcctttgtgggaactcaagagcttgcagtctattgatcggagaaatagatggatgtttctattcacagtgatgggtcactcttcctttgtgtaaaaatgagcactcctgttttatttacctggcaagttggatttccttgtgtctgctaacatagtttaccattggcctacatatatggtggaaaaatgcaaataacaggagaagacttaaaacacataatatgctacagtataatattaatataataaaacacatattatgctacagtatcaagccatcaaggctttattaagcacctactgaatgctcagggctttgttaggttgcaggtggaacagaatgaggttattaatttctttacagatcttgcctctttggagtttattatttggttggaggatgtggctgcccactctctacctatagaagtgttgggagtctcttttccaatccctgagagataccacctccaattattttctactgcctgaaagtctgccattgtaatacaattactttaacttatattttttggatatttaaaaaatatgtactcaacttgctaaaaattcctttaaacgagaagcacaattttagccatccgtttcaaacttgtctgcacattggaatcacctggggagcttcttaagccaccgatgcctttgtcctttagctgccttccccccaaagattgtgacttaatgggtctggggtgtaggattttgtgattttttaaaaaccctcaggtgattctaatgtgctgcaaatgtgggaaccaaagttttaggtgttatcagtgatttacataatactgtgagttaattggtaaatttctttctttaaaatttgctatgcgttatgggtgacaagtctgaccacactgggaaaatgtatgttcttgtgcatgttctgtggaaggggaaagatgcgtgtctccttattggaaaaatgctgacataaaagattagttcacacaacaaaagcaattaaaaatcgtataagatagaatattgcataaattatgcgctaaattgagtactgcttcctaatatgtcttagggatcagtagtggaaaatggcattagataccagctcctctcttctcatcagttttcatcatttcccccaaagagaaaaaaatattctgactccatacctagctaaaacaaaatctttattacttcgtatgagtaatagaaacaatttgttgtgatttaacacaaagttaaataattatcttttatttataaatcacagaattttgccagtccaatagtaacaaacaatagctgctaatattcggtctgggaattgcccgactcaataaccttggaaagaaaatgaagtgagttactcagcaggcaaagatgtgcccattgccagactttattttcaagacagagagcactggatgacattgtgccattaccagttaccaagttcctaagcaatgtgcccacttgttagaatgatgttaagctgattgaaatattagctgatcttcctccaaaatctctagtgaattttgtaaaattgtcgtatgccattagagggataagattcagcggcctcaggtatgcttagaaacacttcttggaggttaccaagtatgttgcaggaagtttataaccaatgcaagcatgcagtggcgccctagacacgcgcaggggattggaacagagattgaggaatgctgagggcagctggtggaaagtgatgaatggtcgtctaagggaaacagcaatagtctcttcttgggtattgattgaatagcagttctgagtgttatgacaaagtggctacggcttctcaaagattacttttgaagttacatgggaacccataggttgttattttttatggatgatactcttctaaggggaaagaagataggaggctttcaaaactggtaggcatttatgatttttgtgagtgaattggcaagtttgatttagtttatcataacgtatctaaatatgctgctttgatagtggccttgaaaacatcagaaatgtgtccctgaatgccaccagtgcagcctatgtccattacaacatccagagcctgattgaagaatcggaggaactggccagagatgctcacaggactgtgactgagacgagcctggtaggaaacgacgtggcttctttttctgggctctgtgggagatttttctgtaccgggtttgagcagagattcagtggccccaatttctgcctattaacattcttttctggtggaatctgtttctggcttctgtcatcatatgatctgtgttttaattttttaaggtcataaatacttctttatacagactagaaaccagtgtggagatgagaacaatctcacatttccttgcgctaaaaatgatgatgctacttgatacctactggagacatttttctataaccatggtgaaaatctttattgaatggctggtttccttccttatctacttaaaaatgtctttgttttctcttgcctcagccattttaaattgtccctacctggtacctggctgactttcttgctgggaatgtgtctgggggctactctgatggagtcacttcctctgtccccagcaggactccaccctgccctgctctcaccacgcttaagtggttctgttttccagctctcagaatcccttgtttctaacgggaaagcggccgtgcagcgcagctccagatttctaaaagaaggcaacaacctcagcaggaagcttccaggtcagtatgtggctcggacggtgtagacaggcagagtgagcgtgagcgtctcgctgagcagcctctaagaatgttctccttgcatgcagcaacttgaagcttagcatttctgtgtcccatttatattccaatttcctatcatataaattttcctatcgtataaacttcctatcatataaacttcatataatttggcatttttattctagtgatatctgttcctttattgtgcagtcatctctatctttaacctgtccataatcctccactcattgccttagcttggagccttcactgttcttcctagtgtctgttgggttatctttgattgcgtgtgctcctctagtttttccttgaggagatgtattatgcttgatatttcttttacctttctcatggaactaatatcatattagactcatggtaggttctcatttaataatcattaaattaaatcctaattgatttagccatttttcaaaaaatacctatgcagtttagtttgtcctaaagtttcaagaaagaatgacttggcatatgtaagagcaatccatccaataaacatgaaccaaagtggcagcaggaatctgttatgtaagagaaactacgtaggcctacaattttttataacaaataatgtgctttccaccttaatatattctaatagatcaaaaataccaagatttctggaggagtaaatagtgggccaggcacacagctcataccctttacaggtgacttacttccgagtctaacactggatccttccacagctgtctgaactaaaggcttggatatgtacataatttttttttctcattgagtgacacagtttaaaatttatgttgtcatctcacagtatcgaaaatgtataatgtgttgatgggctgtaatttcagtctgtacaactagaggtacttcataggtagtgaaattgggagcttgctggcaattaaaatttcacgttttaaccatgtgctcaaaatccaaatgtgattgtatgttatgaacagaaattttaaaagtaaaagctgtgatcaaacttgagaaggaggttgagttgagttccagttgggtggccagaagggaatagtaggggatggaggattggccagagatgcaggtgggagactgtgaggaagactcccaggtaggagcccaccctaggggttttacaacccagaggagaaaggtggccaggattcagatgggaatagaaagttagtgtgtctgattaagactgagtgacttaaacacagctcttcatccttgagctctagtaaaattggacatgaaatttaagtagaaatattagtgaaaaagtcaacaagcaaagtagagaaaatgatcgagcaagctagaaacacattcttaatttctttttttttttttttgagacggagtctcgctccgtcgcccaggctggagtgcagtggcacgatctcagctcactgcaagttccacctcccgggttcacgccattctcctgcctcagcctcccaagtagctgggactacaggcgcccaccaccacgtctggctaatgtttatttttatttttatttttagtagagacggggtttcactgtgttagccaggctggtctcaatctcctgaccttgtgatctgcctgcctcggcctcccaaagtgctgggattacaggcgtgagccatcgcgcctggcccatactcttaatttctataatgagtggtgctcagtcttgctggaaaaactgtcaatattgggaatctctttagaaagctatgaattctgtcgatggtcaagaatgataaagctgttgcctaggcaacttttttgtaggctaacctgaaaggaaacatttttctccctttaaataggtattgcattggaactgagtgaattgagaaataagacaaacagatttcaagagaatgctgttgaaattaccaggcaaaccaatgaatcactcttgatacttagagcaattcctaaaggtaagtggaaaggactttcttctgtaaataacgtcttctcattgtaaaagcatcactcaggaacataaggaagtcctgcctcaagactgataaaggctttagctcaaaaatgagactaagattggcaaaatttttacttgcaaaggaatatgatttagaaatgaaaatcattggtttttaaaataacatcacaatacttgcatcaagctactagaattatagtcttaaaaacagagactgcatagtatctgaattgcttacttttgaaatgggattgacacattgcttagaggaagaaggaccattgaaagaagtcagcaagtaaagaagctggaatgtgctttacctgcctaaggggaaaatgccagattcattatcagtgtggcgaactgaagactgctcgcttggccatcttcctcagtgaggcagtaaaacattaggctcactgatcactttaatactgatggtttagaaatgtggtattcatgaaattttttgggggggtctacagtaattttattgtaacagagaagccaggccgcaataagtctacatgattagagcagatggtggttctttccagtgggtgaagcctgaacccggctagcagcacacattttttgagacagagtctcgctctgtcgcccaggctggagtgcagtggcgcgatcttggctcactgcaagctccgccccccgggttcacaccattctcctgcctcagcctcccgagtagctgggactacaggcgcccgccaccgtccccggctaattttttgtatttttagtagagatggggtttcaccgtgttagccaggatggtctcgatctcctgacctcgtgatccgcccgccttggcctcccaaagtgttgggattacaggcgtgagccaccgcgcctggcctaaagttttaaataggataatttttttatgtgtaatacaaatgaatcgtgctgcacctcaaacttctcttttgttcttttgttgttttttactttgaaaatttcaattgttttatagagaccgtgtcttgctatgttgcccagattggccttgaactcttggcctcaagcgaccctcttgccttggtctcccaaagttctgggattacaagtgtgagccactgtgcctgtcctcctttttttcttaataagcatcttttgaaaaagtcttataaagtgctttaaagccattaaaaacaggaagccccaaagtcctgtttgtaagcatggaagttacctggggaaactgggcatgctgcattgggcttacttcttactttgaaacaatggagcattttctgatccggaagattttttttttccttttctttttttataaggatgccatggtatattttgactaaatgcttaataacgtttttatttgaaaataatttcgagcctacagaaaagtttcaggaaaagtaaaaaggccacctgtataccctttttccagctttttctgctgtaaatgttttgccccacttgtgattaaatgcttcgaaaatgaatgatagtgtcttttaaaaatcctcacccagattttctagaataactgaattccaatttaccttgagtggctgtttgggctttattctgctgttacttctagcagccagttgatgctatgggcaaatacctcttcctttaacttaagacattcccaccttagctgcagacctaggatccaaatccttattatccagacatgaaaggaggtggaggacatgtttcatgaagctgagaaaggagtgatggaaaaggacccaaataaagaagttcagcttattaagatgtaagacacagctcacacagcgattggccattacttttgtgatctcattgtttattgaaatcatattccagagaagtattaacaaaaattatttcatttgtccctaaaaggggatagtagagcatatgatatgcagctttaatattgccattagaaacaagaagctcttagttcattgaccactgcccaaaagaaaaaaaagcaaacagacaagcctcagtttgtgttcagcatcagtaatatgacaataatatatttctgtgcgaaattacatttgttgtcgttttattcttttctctgtgtgtaagcaccagaagtgcatgcttttatatacatttattttaggtataagagacaagggagccaaaaccaaagagctggccacgtctgcaagccagagcgcggtgagcacgctgagggacgtggcggggctgagccaggagctgctgaacacatctgccagcctgtccagggtcaacaccacattacgagagacacaccagcttctgcaggactccaccatggccagtatgtcagcgcccttccttccagtcatgatcgtctgcgtcatgcagacgtggagctagctaagcacacagtggtgcgtttttcacaacattcctgaaaagtagaagtatgctaacatctggattagcctttattaagagaaggaccttgggaaatgcatgctacttgtgcagttttcatctttgtaccacaatgtcatggctttgattgttagggtgttgttttaccaagtgcattgttaatggacaattaattatcttgtttttccctctccccaactttcttgccaccccttgccttcttgtatttgttagctctgttggctggaagaaaagtcaaagacgtggaaattcaagccaaccttttgtttgatcggttgaagcctttgaagatgttagaggagaatctgagcagaaacctatcagaaattaaactgttgatcagccaggcccgcaaacaagcagcttctgtgagtttggggccccgtggctttcgtaactgggctctcagtcatgtggggtcccagggaattcatgcagacatggccctcagtcacactgcgccccttagggcttccaaagacccagatcccaataatctgggcttcctcatagccctgtcttggtatatttaaagccaataactagcttcattttctttgagttctgcttttgttcaacatgcttcaaaatgttgttagcaaagagatttccatgtctttatggagatttatcattatagactaaatttaaaactattagcctggacagtgcggaacatgtcaaatctacgtgttaacatcactcttaagtttatgggttgcatgtggtgttagttcttcgttttaccaacttagttttaataatccaagtattccttaaaatgtttgtgtagtatgggcctcatccttgaggtgtctgagaaaacagtttgtatgcaacgaaggctgcacaaatccaggtcactaaatgcctgaggcactggacacctggagcagttcacacatgagaagatgttttacccatggcacatggcactggctgtgccctaagggaaaaagtttccttttgagagaatgtgcagtcgtcatgtgattggggacttcgagaggatgaatgcagcctctgggcttgcatttgtccacctgaggctttctagggaagagaaaggagcacagggctctgtcttttccaaaacctcaagtgtccttgctattggaaaaggaatgttggtttccatgagctctggcttgcatctgtttcagttacaattgctaaataaatacaggctgggcctggtagctcacacccgtaactcccacaatttgggaggttgaggtgggaggattgcttgaggccgggagtttgagatgagcttaggaaacataataagatcctgtctctactaaaaaaaataataataataaccaggcttggtggtgtgaacctgtagtcccagctactcaggaggctgaggcaggaggattgctcaagcctaggagttcaaggctgcagtgagctatgatcacgccactgcactccagcctgggcaacagagcaagaccctaaataaataaataaataaataaataaataaataaataaatataagcccaaggaatgcttcttgatgctaggttaataccaaacttagactctttaatgtaagatacatatgcaacgaattactagtcaaagaaatatgtagtaagtgcaataattgctctataaatatctgctgagtgaataaatatattacctctccatttattcaacagatgattatcaaataccctctttctttgtgtcaggcggaaagattccaaggtgataagatccttgtctttaaggaattaaatcttatatgagcaagacagtttcctatataaaataacttattaaaaactaacactgattttctcatatttaaacacttaatgaaatcatttttgttaccatctgatatgtcacttcatgaaacatgaaccattgtatgttatcaagagaggaaacctgcctcagtgaaaattcattacagaatagcattgttgagctgctggtgagctgccggtgtgtgtcactaaatgatggggacactttcattttccttctacagattaaagtcgccgtgtctgcagacagagattgcatccgggcctaccagcctcagatttcctctaccaactacaataccttaacactaaatgttaagacacaggaacccgataatcttctcttctacctcggtagcagcaccgctgtaagttatggacctttggaaagcgacactgaatcttttatgcacttctagatttttctgaattttcacttatttgacgaaaaaaaaataggccttagtgaaatctctaaatctcccatagggactaacctttgttaaaatggtagcattagatgaaaaatgaacaaactaccaaatggaatgcctgtgagaaggaaagtggcgtttctgaaggatgccatcttaattgtaagccttggggatggaacttttttgtgattcccccgttgacccctggagtgactgagtagcagaattgtcaagcttctgtcaggtttttcttgccaaggattccagtggtctccagatggcaagtgcctatgaaaggtcttcgataccttggctgtgccagtgagaacaggtcagaagcctggggtgtgtagggcagaaaatgttaacgggcacatatagtatctgaaatgtcttcaggagatgagatgcaaagtgcatgcaagtctgtgacaggggtgggacctcatggctcctgtcttactgcatatttcacatccatttcttacctcggagactgggcaaaggagcaagctcagtgccttccctggtgctccctgtggactgcctgtgacctgcagcgaattttcctggggactctgtgggagacattgaggagggccatgccaggcacgcagggaggcgctaatgtccccggggctgtgagtcatgccccagctccagggaagggaccatttcaaacaaaagaaaatagatttggggggtttgctttttatgtatttatttttaagaaaagagaaaaccccgtaagaattgactctgtaaagtgttgtggtggtcagcaaacagtccagtgtgtaaactgatccccgttcattcctcgccccccagtctgatttccttgcagtggagatgcggcgagggagagtggccttcctgtgggacctgggctccgggtccacacgcttggagtttccagactttcccattgatgacaacagatggcacagtatccatgtagccaggtagaagagaatgttctctcaaagcagctctcttttttaaagtgtgtctcataagtaattacatgcttgtaacatcatataataggctttgaaacttctggaaagtcagattataaccaaacaatacttggtttaggttagctgtagaaataagcatttgtggccagtggctcacacctgtaatcccagcactttcggaggccaaggcaggcggatcacctgaggtcaggagttcgagaccagcctggtgaaaccccatctctactaaaaatacaaaaattagctgggcgtggtggtgggtgcctgtaatcccagctactcaagagactgaggcaggagaattgcttgaacccaggaggtggaggttgcagtgagtggaggtcgtaccactgcactccagcctgggcaacagagcgagactcccatctcaaaaaaaaaaaaaaaaaagaaaagaaataagcatttgttacaagtgacagaacttcttttttaaggctgaataatagtattccattgtgtatttgtgtataaaaccacattttctttatccattcacacattgatggttaatcattccacatcatatccaaaaatcataacaacattttgcacctcagaagtatatacaactataatttgacaatatataataaaaattaattcaaaaaatttttttaaaaacttaaggtttggatttttttcttactgcaggagaaacaaactttgataccaaaatcaacaatcagaagaagaaaaaactgaaaagcttaggttacctttagaatgtctaaaatgtctaaaagtttaggttacctttggagaccaggcatggtggctcactcctgtaatcccagtgctttgggaggccgaggtgggaggattgtttgagcaagaaggagtttgaggttagcctgggcaacatagtgagactctgtctctaaaaaaaagttaaaaatttatccaagcacagtggtgtgtgcctgtagtcctagccactcgggaggttcaggcagggaatcactggagcacaggaggtcaaggctgcagtgagcaatgatcacaccactgcgttccagtctgggcgacagagcaagaccctgcctctaataaagttaaaaagtaaagaatgttacttttagaaagtctacgtgtaaggcagccaacctggtaaaattcctcaggagagaggtgtaaggtgtggcatggtagacattgcatgtggctggcagcacattgcacttaagtcaaggacagaaaataaggatgcaagtggggggtgcattttcttaaaattcaggcacaaagcaaaattcttctttttaaaatccttcagaggtaatcacttttgagcagctttaagtgtatgttttcacttttctataatattatggtttgttgggatttttttaatttacaaaatgggataatatttacggagtagacatatcttcagatacagtttagctcatctcagatgttttaagcagggacacaacatgatgaaatttctgtttcggaagagacactcttgaagatttcgggcagtaggcaagactggaagccaggaggccagcaggggggtgctgttgcagggcccttggggagaagcagatggtgggtgtgaaggaaacgggattgtatgtgcgctgactggaaattctgaaaatttcttttgcaattctttgtaacccttagatttggaaacattggttcactgagtgtaaaggaaatgagctcaaatcaaaagtcaccaacaaaaacaagtaaatcccctgggacagctaatgttctggatgtaaacaattcaacactcatgtttgttggaggtcttggaggacaaatcaaggtaacattacgaaagttcttctgaacaggactgattgactgattttacctatatataaaagtcatgggccgggcgtggtggctcacgcctgtaatcccagaactttgggaggccaaggtgggcagatcacctgaggtccggagttcaagaccagcctgaccaacatggagaaactcttgtctctactaaaaatacaaaattagccgggtgtggtggcacatgcctgtaatcccagctactcagggggctgaggcaggagaatcacttgaaccctgggaggtggaggttgcagtgagctgagatcgcgccattgcactccagcctgggcaacaggagcaaaactccatctcaaaaaaataaaaaaataaaagcatatgtttagatggttgaatatatcctaagcagatgaagatgtttctgcttttgttttgctttctgacagttcctctgcagagttaggctggttttgtacagtaaagggtgatgcttcatcagtagcataaatggagaaaaagccaatggctcatcttgctgtttgggtttctttcccagtgatgaacaggaaattcagtgctccacgttaatttctgtaaagtttctttatctctagtctagctctagttagtggtcaattaatactaatcagtgtttagcaaaaaagcccaccatatttattttattatatcagttctcctctcaccaaatataattgtgttttttggatctggttcaatgctctgaagtgggagtctaggtctcaggtccagctgggccctcactaccaatcacattctctggctctctgttttctcactcgtacaacacgattctctccatcaaccctagtcactgagatgatctttaagatcctgcccagttgttactcattctaggattccacttcataactgaaaggaaatccagtgattacaaactggcttttttctaatgtggctctctcaaaatttggatctgttagattgaagctcccagagagaagttttgtgcacttggagaatgtattttgcttggtcagcttatatattggttatgtttgtttgcttgtttgcattagaaatctcctgctgtgaaggttactcattttaaaggctgcttgggggaggccttcctgaatggaaaatccataggcctatggaactatattgaaagggaaggcaagtgccgtgggtgcttcggaaggtaagatgtcgtcacggtttagcacatagtatgttattctgttaacatctgagaagtgctgaaagaatgtattaatacatgcacgtcaaggaatagagtttgtgatatcgctggtaggtgtttagctgccaattacaaagccatgctttttcatacgtttattgtcaaaaaaaaatcctgtgacattggtataatgtagattataccaatctacattatattattatattatattgtcagatgatataatgtagattagttactgagagaagcacaggtatcatttttaaccctttaaaaagaagtgctctttttcctatgtcttttatgctttgatcatggatcataaaccctaaacgtttcagacaatttctcaaacaaccttctgtctcagagagccacaaccaaatctttataaatcactgtacatttttattttgaaaatatctccaaggataagaattttttcacgtgtggtcagtttttacagctaagtactttccaattccgaaccaagttctataattccagaaataaaatgcattaggaaatagagaaaaatgagtatgtttctgcatatattgatataaaggcattcaatgacttaaccttaccaagtgcaacatcttcccccccaacccattattttataacaaaataactgcaactccttaagtatataaaacctgttttccatcactttagtaattaagacataaattgcttttttccgttagagaaatgtaacatctgatataatttctcttgtctaatgggctgctctgtccagatggatatctgcaattatccagtgacaagatcagttaaagcaactcacagcacatttagaaactcacgggtgaatttttcattttgtcattgtcaggtctgtagtttaagccttctcttttccccttccttcgcttgtttaaaaagttaggaccaggcggtcatggtggctcacgcctgtaatcccagcactttgggaggccgaggcgggcggatcacctgaggttaggagttcgataccagcctgatcaatatggtgaaactccgtctctattaaaaatacaaaaattatctgggcatggtggcacatgcatgtagtcccagctactcaggaggctgagacaggagaattgcttgaacccgggaggcagagccaagatcatgccactgcactccagcatgggtgacagagcgaaactccatctcaaaaaaaaaaaaaagttaggaccagaggtttggtgattgtagccttaagattgaaaaagaatatagggtttggagtcttgagtttctcaggcttctggcccaggtcccccaccaaaattttcttccctgactttggataataagtctcttcacctcactgaggtttggtttctttttccagaaaagaaaaatgatcatcgttcttgtcttacccacctctataaatcacagtgatgaacacacaacatgatgcgtgtgaaaatgctttataaactggaaacactttaccagtcttcaccactggtctcctacagtgatgtggctttgctttgtagataaatgtcacaggatttttttttgacaataaacgtgtgaaaaagcatggctttgtaattggcagctatgataaaaaatgctgttgcctcgtgaggtaatgacacaccctgctctggaacttcagtggaaagagcatctgaattcaggctctctgatccgccactttttccttattctgtgtttccagcaaggaactcttccagcaatttagtaattctaacatgaaaaacaccccgacccctagactctatcccctccactgaccccagatcattaacctcactgttagaaagaaaaatggttaacagaaattaaacatttctagtatgaaaaagtccccctactttacctgtgaccatatcctctattttcatcagtcatttccagaggtattttgaaatcattgacgtcaagctacagcactgaatgaattgaatgatttccggctcttctttttttgttgggatgaggaagtcagctttttaggtggtcacatgttttgttccccttgaaatacctggcctgcctccggatttccacacaccctggacctttgggtcaaagatgctgccctcctgccaactcgagactggctttttgacggagggctggccacccagctgagtagtagaaccacattgactcatcagctcaaccaaactagggtctgattaaatatgtttttctggggactgaacaaatccactgttatattggccaacatttccaaaaatacgtgtttgtaaagaatgctagtttggtgtagggtattaataggtattgtgtactgatcataaatgtttgggaaacactgagttaaaaaaataagcatgtttcttggctgcgaggccatcggagcctttaattagcattaatatgctgacatgcatggtaaccctgtcctggggagaggctagagttgcagcatttcccaaactcacttgagcttgaaccctttctgaaaaggtacctctgggtgagggtcacgcctgtaatcccagcactttgggaggccaaggcaggtggattgaaaaagattagccaggcatggtggcgtgcgcctgtagtcccagctactccggaggctgaggtaggaggagcacttgagcccctgcacttctgcctgggtgacagagtgagatcctgtctcaaaaaaaaaaaagtgcatctggagttgcatctgcctcgtaaaacatattttgtgaagtgctgatataggcacagactggcactttacgtctgtttgtaaattgattgaaccgtcttcattttaggtaacatcccccactgcaccccttctcctgttagacaagaactttagttcaaagagttaataccctaattctagtaacaatccattttagcagacttagattataattccttgtccctttctgtttgtgtataatttgccattattaaatcattagtgtagcccatcgatgtcctctaaatttttaaaaaatttttgactgtttactcttaaacgtgatttatattaccaagtaaatgaattgaaacttttttattcctccttgaatatattattacacttgtacatggggtcactctgtaattatgagcagtctgttatattctcaaaggatgctgcagaattaaccactgattctaacagtcctcatcaaaatcaatatggaaagaccctttatttaattaacaggcataatccttgtattatttacgagtggacattgtgagagagtgctggctacgtggctggcctttgacacgagtcagtcacctgcgttccgggccctctgctaggtaccggccatgtccacatacatcacacatttatgtcctcagacatctcatggcgtaggggaaaatgcctgtatagaaagcagaaaatgcatgggctgtggcaaggggccagagttggagaagcagcatcccaagcccgggccagggttatctcatgccctcgcatgacggcagcagggcatgctagtaggtcagctccggattatccacatctcatgagggagccctcggagaatcagggaggtctggtgattcttccagactcacggggctgagcgctggggagggcggacgctctcctaattccaggctcccacttgaacctgcgggtgatggtggcatttccaaggctggaacagagctgtccacaaagtgctgtgatgaaccgagctttcatttgtcctgggcccttaccaaggcagagacccacttggggaacaggcacctgggccgactgttgaggcacatgtgcctctggtcatagtctggaaactggcaggggctctgggagaagttcagggaagtgactgacatggggacaagccttcggtcatgttcagtcatcatttcatttgaggtccccctcttcgtggccacctcactccagcaggccctgtttggggagagaacccagtagcagagcccccgcgttcttgagagaggagggctcacaggctctgggaagggagaaagcccccatgtttttgggagaggagggctcacgggctctggagagggaagggccatgcactgaggaccaagacaaatttctggagttttgtttgaaacctggctttgtgatttcttggggtgtgtccttgaacaaggtactttaatctttgaggctcagcttttcataggcagaaatgaagaccggcccatcgaggacctccgaacactgcagaataatgagagaaaacatctgttgtgtgccaggcactgttctaagaactgcctggggcagccctcccagagaggttttatggttatccctgttttatagctgaaggaaagggcacacagagaggttaggtgagttttccaagttcacacagctagtatgttggggacctgggatttgaaccctagtagtctagctctagagtctctatcctccggcacatgcactgtggttggccaagaggtagaacaatggaacatatggctaggaagccacaggcttaagaattaaagaattaaaccatagttgaagaatttatctagagtgcatttcttttaagttataattcctcaaagagaccacatgatggaaatttttgaaaaagcaagagtgcaggtagttatagttatacatttgaaacctcaggtttcacaaagcactattttttgttttgttttcttttatcatccatggaaacgattttactgtttggttagactgccttgcttggaaatgtggcactgagttttgttgttacacctctaactgggaacagttcaaattcttacccaaaaactatcctcatccaagtttcactctcaagcctcatgatattccagaaaattatttttggaacataattatgatctgttccagatgaatggctttgcgattgaatagtgagtcaagtcagccttttgctctgttgggggagaagaccagaaaacacactcacctgaaaatgccctgggccgtattatatccctgtttcaacctacgtactcatctctaagtatgatatgggtctttaagctcatcctgcagatttttgaggatgtcagtgatgattgttttgtgaagtgatgcttctggtatatgggcacatacttgctttccatcataactctagtttccctaaggtattagataaaacctcatcagcaaagtgaaaatgtcaatataaaaattattctgaaggcaccagagttaagagaggacagttatattaaaggagattagaataaataaatccagttgataaactgaaatatttatagcagttatcctcctgtaaagaaatgtatttttaccacaatgaatactgcctacattaacattattttccttataaagcagctgggcatttgtcttgcatcttcacatggcaagcatatttttaaatattatcatctacacttgttatgaaagtatggaactaatagctctacagtgatctttgtgaaggagaactcagtaagtgtgttcttggttctttctaccctcctgagaatggattctatttcatctcttctgctttgcagctcccagaatgaagacccttccttccattttgacgggagtgggtactctgtcgtggagaagtcacttccggctaccgtgacccagataatcatgctttttaataccttttcacctaatggacttcttctctacctgggttcatacggcacagtaagagtgtttgtgcggccctaggccctactgtatacacacatttagattgctatgtggttgtttatgtttaatgaggatttactaattaaatatgtacatatgtataccatacaatttttatgagcatatgctagtattaatatatgtgtgtgctaaacaatttcctcattttaaattatttattatcattgtagaacctttagaaaaatatagaagaacaccaagtagaaactagccttctagtctttatagatatcaattcaacatttgttattaaatttcgagctcaaataatatgtcttgttctgggttcactgtgaccaccgtgacattgtttgaattccatccatgggaatttcatgttcttgtttgcatctcatgggctggtgatttctgtctttcagtcttttggttttattttttagaacgggccccttgtcagtctcaatgaaaaagatacgaggagattccacttctcttactgaattgtggattttggtaacaacagatgacatttcatttatattagtgtagtgttctagaaagccttcgtgggcatttttggtttcgtagccgatagacctctggctgtggggccagatccagttttctcagtttgactttagaaggtttcagccatccctgacttgaagggaaagggaaacctgggataaagctataacctggggaactgtgttctcttttttacagaaagactttttatccatcgagctgtttcgtggcagagtgaaggttatgactgacctgggttcaggacccattacccttttgacagacagacgttataacaatggaacctggtacaaaattgccttccagcgaaaccggaagcaaggtagggacacagatggactcaccagatgtcggtcaccctcataagaatagaaatcttttcaaaatcagcattctttttttccacagtagtttcctgggtattgaatgatagtctacttggaagccagtgttgtctttggaatactaaccaacaggattcacattttgctggaggagggttatacttgtatttgcctgtgatttccaagtgtgttatttaacagtaaatgctggattggaatcaagaatcaaatccattctgttttcttccacatgcatactgctcttatttagcaatgtgtattgactttgatagagaggattttcacttgtccttcaatagccaagaacattagctgatcaaattcgcagaatctaaaagaatatgcatttgtaaatgagctttgttgccagaagtttgcattttaccttaacatggaaagggattttccttttcttatctcttgcctgtgctctccttttaggagtgctagcagttatcgatgcctataacaccagtaataaagaaaccaagcagggcgagactccgggagcatcttctgacctcaaccgcctagacaaggacccgatttatgtgggtggattaccaaggtcaagagttgtaaggtatattaaactgcagaattttcatgtcgctgatttccaactttattagcttgctagggctgagaatggactgtatcacaaaccaggtggcttaaacaacactaatttattctttcccagttctagaggctgcaagtccaaaagcaaggtgttggcagggcttgcttccttttgagggctgtgagagagaatctgttccatgctcctagcttctggtcgcctcagggattccttggcctgggtcctgtgtccacatttcccctttttataaggacaactgtcatgttgcataaggacttcccctaatgacctcatcctaacttgattacctctgcaaagaccttttccaaatgaaggccacattcacacataaggaggatcaagactaccacatcttttgggaggacacggttcaacctgtaacatctgcttctatttattcagagtactctatgccatgtgatttgagaagtaaagcaggccttctgcagaaaaattagtgattttatatgtattgcctttagaacgtctaaatcctgttaccgtgcaatatttggagaccctacttgctgtcatacttcatctccctctctctagacattttagagaagtagatctcttttaaggcaaaaggaaaaaaaaaaaaagaaatcatgctttctgcagacttttctggattctcctttgtgtggttagactgaataatgtatgtgcaagttgaaagaccagcatcaagaagtggaatgaaatggcacaggacacacaatggaatccttgtgtaagactgattcatgttgagctttgtgattttaatgatttacagaaactttgtgtggctggttcattgtcctcagttttgtaattttggttgtaattaaactctaaggttctttcacaccattcaaaaaagacatttgtgaaagtccaatagtcaaggtaagacagcttgcagggagtggggtcattagatgtccaaactgggccattcagcgtagtggttagcaaatgtccatttgtagcagtgctctatctttaggtcaagttctttcatagactcctcttatgtggcacagagctgcagccattcagttgctatgatgagcagccttttgtagagagagccacttctccactgtgccccttctctttgccaggtatcttagaaagtcccagggaacacagtttgcaaccacagccgcctcctgatcttagaattgaatccatttaaacctcagcggagttggtcacttgcgaagtcttaccttcctgccaagacggagccaggactggaagctgtctccagatcccatcccagattcatgccctgtcatgctgggaccaggactggggtgttcctgtagcctcggctatgtcctagtacatctggactttgcccagacggcccagtgtagacaacgcaggaaaggacagaagcccatatcacagatgttctcagtagaagggacttaggtgtcatcaaagccagcctcctcgtttacatggaaagaaattgagatctagaaaggctgaaatttgtccaaaatcatatagttgcttaatggtccatagctcattgttcaacatgagaaaaaaaaaaaatgaggtgtggctgtaacaggaaaccatgttattgcaaagctctcctgtgaagagctggtacagaagagtgcagctgggagatgttcagtggtctccatattttggaaattagagctggactacattatagcctgacctcagccaggagtgtggagacttctggtaagaaaaatatgatattgacttgaacattgagaagtagagtttcggataatcccagacttcaccaaatacagttacttcctttaggacaaagttcatggatatgcaacgtaaacaacagccaatgacttcctttgttagcagtcagatcctggcaaatagcattacctgcacttgtccccatgggaagcaaacattctactctacatggagactggattataatctatgtgctgcaatgcactgtgcactgtctttcttataattggcctgtgttttctgtaggtagccatccaagtagccaaactcactaagtttgatccctttctctagtcctaaggagagtaagagagtatttgtttgacctgaagttctcactatcaatattgctcttagagggaggccaagacatttctgcagagtaacacatggaaacaggtattccagaagtatagggttccccccaccccccgccctttcttgttttggggggcaggatcttgctctgtcacccaggctggagtgcagtggaacaatcatggctcaatgcagcctcaaactcctgggctcaagcaatcctcctgcctcagtctctgggactacaagtgcatgctaccatgcctggctaattttttattttttgtagagacagggtctcactatgttgccctggcttgtctcaaactcgtgggcttaggtaatccttctacctcagccttccaaagtgctgggattacaggcataagccactgtgccttgcccagtggctttgtattccttctttcaaaaatggaatttaaaaacccaaattttgtgattgttctcatgcccttccctacaggagaggtgtcaccaccaaaagctttgtgggctgcatcaagaacctggaaatatccagatcaacctttgacttactcagaaattcctatggagtgagaaaaggctgtttactggaggtaggaaacattgttattaatgttcaaatgagtttccataagtgtccattgatttatcaacatcataacacaacaaaccagtggggatagaaaagagatgatggggaaatcagcagtgtcctccccacggaaggtttggccgcagctaggaactcaccatgctgttccatctcctctgtgtccagcccatccggagtgttagcttcctgaaaggcggctacattgaattgccacccaaatctttgtcaccagaatcagaatggctggtaacatttgccaccacgaacagcagtggcatcatcctggctgccctcggcggggatgtggagaagcggggtgatcgtgaggaagcacacgtggtgagtagggccagtgctcctgagccccaagctcaggaaattacttcgggaaacaatgagtggaaaatgactgactcataaacatttattgtcaccgtgttcctggttgtttatggatgtgcattttcaataagtaaaagttattgttgctgaatgtcatcccattatgaatcaatgatttctcatattgcataatccatcttcattgtctggtgactgaggaaaaagttatttgctgtctacctctaattttttaaaaactcattcagatagcatatacggagttttcttccccatgttgtggtcatttttcttcattccaaggccaacagcagtccttaaatcctgtcgaggtcttcagtctactgctggatgaagcaagactttctttatctattataggattgaaaggagcagcaagggaaatgtgggctgtgataagcacagtaaactaacagggggaaaggagagaaatgatgaccattttccttatttatgttccttttcaagagcataggtgatatttccccatcctctgctcaaatttgtgtctatcacataatttgaagagactttacagaatgttagcacactgtcttaatcaagttgagtccatgcagctaaaatctatagaatgccaccttgtactctgcagggtactttacagacattgctgtgtaattaatcacaaccatgctgcaaggggaatgctgcttcctacattttgctgaggaagaaatgtgctgagagagcctagtaaacctgaccaaggtcacaccactggtatgagtcacagtcaggactggaacacaagtttgcagaacccaaacatgtcacgacatacttggggaagggctgacagtgactacgactggttaatgagttccactgatctttttttttttttttgtagttgagctgaaattcatataacctaaaatcgaccatttcatagtgaacaattcagcagcgtttagtgcattcacaatgttacgaggccacctttcctatctagttgcaaacattttcatcactcaaaagcctatgccattaattagtcactccccattctcctctctccccactcctggcaaccaccaatttgctttccggctgtatagatggatttactattctggatattttgtacaaatggaatcatatgatgatgtcttgcatctttcacttagcatgtctttgaagttcatccccattggagcatggatcagtacttcattcctttttatggctgagtaatattccactgtatatacataccacagtgtgttcatcagttacttcatggatgaactttggggcatttctgccttttagctattatgaataaatgctgctatgaacatatgtggataagtatttgtttgagtccctgtcttcagttcttctgggtgtatacttaggagtggaatcactggttatatgataattctatgtttaactttttgaggaactgccaaacttcttctccattagtcttagtaaggttaccttcaaatcaaagtgtgcttactaagtcagcaaaaaggaatgatattagccattgctagcaagggtattgtgagatactcacgttccaattcttctagtgtataaactacctcttttcaatgtgtcgaaaaaaaattaaaagctttaaacattttcacatccttcaaatgtttaattctacttttcataatgttggaaacaacatcacaggcaaaacaattaaacattcacatgtatggtaataaaaagttggaaaatactttaaatttcattgataaaaagacaaattacaatatatctacttattggtatctaatgtagcaataaaccataaatatgaggcaatgcagaatggaaatgtttgaaatcttcagcaataatagcataatgcagaatataaattatatgaacagagattagaaagtaacatacaaaatgtaacattgtgacagctgaagagattcttaaggaattgctctactcacttgatgttaatcttctcacgttatcttcataagatgaaagttttctaaatcatatagtaatgtgttttgtctgggaaattctctatgcaacctccccagcccttcttttccgtcatgctgatcggaggcaacattgaggtacatgtcaatcctggggatgggacaggcctgagaaaagctctcctgcacgctcccacgggtacctgcagtgatggacaagcgcattccatctccttggtcaggaatcggaggtacttgcacgcggccaggcagtgtgtaatgaaggtgtggtgagctcagagggaatgtgggaggaaccttgcggtggtgccctgggcggctagatgactggggtcatcggcatccagacgattctagaaccttgctaggattctttcctgggaaccagtttcatctgctttgtaataagatacttgtagaatttttataattaaacaactttagctctgccctttactggggcccagcataaattgtctttacattggattgattctgtggcaaatagtagtacactattagtaaatagtattatatcaatagtaaatagcattatatcaacattcctgtatatttccctccaaaatatagactgaatgctttaaaagcacactgggcattttcatcataggtaaagaggttaaaaaaaaaagaaaaagaaaatctctccaaaaagcaatctcattcaatggatatttaataacattccattcgtttctgaaaaatcttcagttgtgagttttaattttcaagattcacctttttggtcacagacagtgtcttgttaaaatgaacctttagggaacttttattattcagtgagaacttgtgggaattatggactaaaatggaattattatttcattatgtttaaagcttttcatttattttctccattggtcttttagaattatcactgtccaattggatgagaacaatcctgtggaaatgaagttgggcacattagtagaaagcaggacgataaatgtgtccaatctgtacgtcgggggaattccagagggagaggggacgtcactgctcacaatgagaagatcgttccatggctgtatcaaaaacctgatcttcaatttggagtaagtgtacctgctctctgcatgttcttgcactttctgacctttcatggtgagtgctaacactaatctgaaatctcattgtactgtttgagattgaaaactttgcaaattcccaaataatgagtgaaccccattgttctatcatgtaagtctccccagatggattttattggattagaatgttagacagatctggtcatcatactttaaaaaccatcgctgaacattagctctctgtggctgtccataaagagccgggattttaatatatttttgacatgcatttgaaggaacatagggattttgtgatgtaagtctcttgctgtcctgagagcattgctttgaaggagctgtttactatggggctactagcagcttcaggttatcaatggcttccccaaaaacaattactgtataattaagaaccagaagcctttgggggtccaaggcaggcagatcatgaggtcaggagtttgagaccagcctggccaacatagtgaaaccccgtctctactaaaaatacaaaaaattagccgggtgtggtggcaggcacctgtaatcccagctactccggaggctgaggcaggagaatcacttgaacccgggaggcggaggtgcagtgagctgagattgcaccattgctgcactccagcctgggcgacagagtgagactctgtctcagaaaaaaaaagaactggaagcctccattccctgtgtggagctcatgatgaggaaaagaactgacatgtgcccatgagcagttcattcctccttgctcaccctctgcctctggacagggtgctgatgggacacaagctgtgctctgctctgtgggaccagcatctgcccaggaacacctggaagtgccctgggcatcaggaaattgaagctccctcctggctgggtcactgacttgtctagtgaccttggacaaagacttggatctttcatggtcacagtgtccttatctgtgaaattacctcttaggagtccctgaaatttgcaagaataaaacatagcgttgggtttgaatacaatcataatgtcagagctctggtttagatttttgcacaggtttatgtttattcccccagttgtctgttcattcattcattcattcattcattcattcatgaggcatcctcatgctcctgaaagtcatgggtttgtggactcggtagagcagaaacgtttctgtggagttcccagctgtgcccgggaaagtgccagggggacgtgcgcaggcacaggacacagcacaggagctgcagagtgaaagtgcatgtgacaagcgtagcccacaacctcctggcaaggggaagcacgtaaacaagaaatcagtgtttcgtggaggtcactgtgcagcgcttgggaactagagacaaaaacgtgtccctgaggcagcccagtcaaggctgcaggaggaggcgatggcatcggagctgacctggggggtgctcaggaatggccagggtctgacatggggatatgctaggctgggtgccattgcaagcagaagcttcagacaagaaatattaagatagcatgtttggactctgagtcacagtgaaggattggcactttggttactctaagagaaatatatacatggtttttaattgattttcattgtacagttatcagatgacttgggttcatggactggtttgtgatatcctaattttgaaaacactctcttgtttctacctagacttttggatttcaacagtgcagttggccatgagcaagtcgacctggacacctgctggctgtcagaaaggcctaagctggctcccgatgcagaggacagcaagctcttgccagagccccgggcttttccagtaggagcggcttcctttactatcagtcaggtccagtcagcaaaggagggcctaggacagagggagttaaaatggggccttgctgtaaaggtgcctgcgaaagctggagctggagctggagctggagctgtgctaaaaatcagagcggggacagggagggaaagggtgcctcaagcaactcagatgacacggcccaatccatagattgtaggccccaacacccaggccgcgcattgggctgatgtataatatgcttttggcagagcttctataaggactcattatcaatttacatttagccaggaaagcatgaaaataagtacttcatgtaaagccattgtgcacatatttgttgctttaaaaaaaaaaaaagattcaattcattaggaaaagccagttctggccaaatattttgaatggcagccattgctatttttcatgttctccccttttgctttctctgtttccctggtttaaagtgtgcactctaataatttagaagatggcagaagcattcaagagcaggaccttctgagcagggcgaggctttgagttcggggcagttttcatggtagcatctgcctgtgctgaagcagaaaacagcatctgggacccccatgacttgggcactcttaggacagcccgcagatggttgcgtggggttcaggggcccttcccgcctggctcctcttgtctgcatcctgccctgtcagtgtggacctaggttcacactctgaggccctgcaaaacatgtcacctgtgggcacctccagttttccagtgcctggtccgcagctcgtctcggcagctgcatccttagggccattcccaaaacctcgggtcacggcgggggcctagggggacagcaaggcctttgccccttaagcctgatgaaaatttgtaggagagacttcagtgtccttatgaatttcagtgaagccgagtgggattaaggtgacagacagaagctctaagtgctttcttcagggagataaagcgctggcgagtgcatcatttaaaccgaagatggagtgagcgccaacaggcactggtggttgttgctgttctaatgggattgcttcgtagatggcccttcatggcggaacacgcgtgtgtcagtggggttcgggctgcgggtggcggctgagtgtccctgtgtgtctcttacaggaacagtgtgtggtggatgcagctctggagtacgttcccggcgctcaccagtttggtctcacacaaaacagccatttcatcttgccttttaatcagtcggctgtcagaaagaagtaggtatcattctaacatccttatgcggcgtctcattgctagatgtatgggggtgttctgcagccacagagtcttttccaaaagaacctgcttttattttatgatgaagtgcttgatttgcaaccaaatggcaaagagaaggaattcagtgttggtgcaaatcacaacgctttcatggtggttcactggggagtctgtggtttctgccttttcccttctggagagtggctggcttcccctttctgtgtgcatgtaaggaagcgtgtgggcatctaaattaagtctcctggatctattattgtctggactttcaaccccattccactttaagcattccctagtctgatgtctttgtctacccaaactcttacactgtggtggccaaaatcccgagtgccacacccacccctctctgcaccttctggccctcatacctgcctgtccctgggacccttctgccaagggaagatctcaaggcctggagcttggggctcccggactccatgttgctcctctctcctcctgaggtcctccagctcacctgccaggcttgcctgcagtctctgccatgccctgcccgtcttgttgtcattggctgtgccaccctgtcatacccccttagacctgggctcctgtctgtcttctgcagctcctgccatcactctctgtgaattcaacagctgcctaacacctgacctttctgtgctcaaactgtgatctgtggaaggtctttccctgctccctcctcagccagcctcttccgtggccatacccttgacttcttcacaggtatccatccctctcacagtctcgactttaaaagcctcctattagcacacccctttcttcttgtctccactctgtgcctccccactcctgcagtttctcagctgcatggagacctctaagccgctagccctaatgccctcccaccactatctcccctcttctctagccccaaatcacaattcatcccccagataggttccaggccagtgttacaggtgtcctctgcaaaatcccctaaccctttctctctcccactcctgcgagcccaggtaaaagccaacattccgccttctctgtgccagaacccacacgggagaccaaggccaaggagatggatgtctccttcctagctggtttgagctggatatcatagccgtcaatctcagatggagcctccaaacgacatggggagccagtgcattgctctaatatgttcatggtttttattctccatgactacttcctcatagctgctcttagctcagagccctgtgcaccgcagtccctcttcccaccccagctgatgacttgcctcgttgagaagaaagagctccttcatccgtccaccaccaaaaagaccagcccctgcttttgttcctgaccctctatctcttctgctaccacagatgaagggtacttgttcctagcaaagcccacccagccagccccagcttgtcctctggatcccatccgccctctcctcctaggacatgcacagcagccactcctcacagaccagcacacagatgccgctgtcaccccatcgtcagcagtgacagcaagagcagcaaactattgtgctggaggttgacacaaagatttttacacagatgccctaatttactcctcataattctcctatgaggaaggaattgttattatctccatttaacagataaggagattgaggtatagggagcctgaggcatctgctcaaagtcacacagctggtaaatggtagagccgggattcgaacccaggccttctggctccagagtctgtgcctgtagagtagtttccccttctcctcgggggatacgttcaggacccccagtggttgcctgaaacctcggctagtacctaaacgtcatatacactgtgttttcctatgcatgcatatctatgataaagttgaatttataaattaggcacaggaagagattaacaataataataaaatagaagaattataacaatatgccagcatcactcctcttgtgcctcgagggcattattgagtaaaatcagggtgacctgaacacaagccccgctgtactgccacagtcgatctgcgaacctagacagctataaagtgaccaatgggcccatggctcctatggtgtggatccgctggacacgggcagacatggctcccatggcgtggatccgctggacacaggcagacatggctcccatggcgtggatccgctggacacaggcagacatggctcctatggtgtggatccactggacacaggcagacatggctcccatggcgtggatccgccggacacaggcagacatggctcccatggcgtggatccactggacacaggcagacatggctcctatggcgtggatccgccggacacaggcagacatggctcccatggtgtggatccactggacacaggcagacatggctcccatggcgtggatctgctggacacaggcagacatggctcccatggcgtggatccgctggacacaggcagacatggctcctatggcgtggatccactggacacgggcagacatggctcccatggtgtggatccactggacataggcagacatggctcccatggcgtgaatccactggacacagacaggattcactttctgggcaggaccgagtgggatggcatgagatctcatcacgctactcagagtgatgcccaatttaaaacttatgtattatttatttccagaacttcccatttagtattttcagacctcagttgactgcaggtaactgaaacctcaaaaagtgaaaccttggaaggcaaaaccgcaaataagaagggactgctgtaacctctgtgctgcactccctctctcactttgacttctaaagcagaaccccccaggagacgtcacattcccccgcacacacatgcacagtacctggctctgtttcccagcaaggctcttgaaagagctgccctttcctcagggactgtttcctcgtttaaccatccggtcagcctcccgcacacccccagctgctcttgagagagttactcgagacccctgtgcagctacatggtgcggagccccctgcactgggctctcagcagcccctggacttccttggctgtcacagatgcacactctcctagttccctgctctctctcggcccgccttcctcagtctcccagctgagagtgctgggcccttccacacgctctcccaggatggccttctatgttccgatcaccttaaaatgccacctagatatggcagaacctacctgtgtagctctggcctccacttagaactcaggatttgtgggcccaccagccactcgagatctgcatgtggactgggacaggttcctcagccactcaacatctctgtgtggcctgggacagtctcctgggcctcatcaccccgaatggaattcgcaggcttccctcagtcctgctctcctgctctttgccgttgccgcgggcacaatcaccattcacctggttgcccaaggcccaagcctaggggctatttttcatttcactttttctcactctccaaatccagtccattggcaaatcctgttgcttcttcctccagaacgtttcctgaatctgttctgagtccccaccgccaccctggtctaagccacccgactccctcccgttggctgtcgtaacagctgcctgatgggacccgcttcacccctgaccccctgacctgttcttcagtttagacagaggatctcttaaaggaattctcggccactccccctttcaaagccctcctgtgacttcccactgtgccgaaaatccaaacaccctcaaagcccctcctccctatgttggagccacatctgccctggtgctgtccctgggtggtccagtgacaccgtggtccctctgacagggcctacccaggcgcagccttcctccacacctgcagtaactctggttcccccacggcctcaggtgggcttcctgatgtcccctgccatcaagctctcactttgcaggggcttgcccctttctgtcattcagacctcagctgagatatcagctttgcagagttacccgcgttgaatgcttaaggtagccactggttggcctctacaggacccactttactgtctgatgtgtttctgtattagtttcatgagcaaagggatcttcctctttgttcacagctttatcctcatcctgaaacagttcccggcagacagaggtaggcactaataactcattatatgaatggatgtgtaaatggatgaaggaatgaatacccctctctcctgagatgttcaatgtaaacgctgaaacaattgttgggtcctcttttgaggttttaaaaatgaaaagtaaaagtttcctttctcaacgctgagcacttgttttccccaggctctcggttgagctaagcatccgcacgttcgcctccagcggcctgatttactacatggctcatcagaaccaagcagactacgctgtgctccagctgcacgggggccgcctccacttcatgtttgaccttggcaaaggcagaacaaaggtctctcaccctgcactgctcagtgatggcaagtggcacacggtacgatctcaggaggcttgtggtggctgcttctgagttctgttccatctatcactcgggttcactccatttctcaaaggcacattatccccattaatctctatctcgccgtgtgtgtctggtgtctcccccagagactacaagtcttgaaggcagggatcttttctgcttccgaaatatccccagggccttgcttagtacctgacgtgaaatagacattcagcaaacattggcgggatgaacaaaaggtactagacatgttcttgacttggcaaggagtatgtaaagcctagcctcccctcatggcatttgctttctgataaccggaactctggagcactttctggtgtgcagcacgctttacctgtgcctgtaatcggccagctgggttgttcttgtccactgcccagaaaagcaaatgcactaagagtggcaggttttgcagcaaagaaagagtttaattattgcataggcaacttgccaggagataattctcaaagccgcctccccaagaattcaaggactagggttaaaacctcgtgtaaacaaggatagtttggcagccgggggataaggaatggcaaatgctgattgattggattggggaagaaatcacagggggtcgaagttgtcttcttgtgctgagccagttcctgggtaggggttactgctctgggtggtgccatttggttcatactgaatgcaaagtctgaaaaatatctcaaatgccagtcctaggttttacaatagcaatgttatctatatggggcaattggagaaggtataacacttaacgactattggctacgtgattcctaagcaataagtagtttaaaagggcaaagtataaacaatgactggttagagtttatgcctacatcttagcaggagaaacaatggctggttagagtttatgcctgtatcttagcagaattcaggcccctatcacaattccaaccttgtggcatttccttaattttacaaaggcgattttggtccctgagcaaggagggagttagttttggggagggactgttaaccatctttgttttaaactgtcaactaaattcctcccatttcgggaagggactgttatcatctttgatttaaagttaaactatccactaaattcctcccatttccagaagggactgttatcatctttgttttaaactatcaactaaattcctcccatagctaggttgaattagcaaagacagcttatgaggttagaagcaagatagagtcagttatgtcagattcctcttgctgtcatttttctatgtcagatttctttcactgttacagtttttgcaaaggcagtttcatacctgcctcctttcttctgccaggctcatccacttttcgtcaccaactgtctaaaaatttgaaccttcctttagcattgcattcaggttgttatagctctcagaaacagatgttgcatctgttaaagtttatacatctgttaaaagttttttcagattcctcaaaaattatgcatgttttcactttgctgtaggtcaagacagactatgttaaaagaaaaggcttcataactgtcgacggccgagagtctcccatggtgactgtggtgggagatggaaccatgctggatgtggagggtttgttctacctaggaggcctgccctcccagtaccaggccaggaaaattggaaatgtaagcagcattttccatactgacattttaccttcgttgtgttcgtgtttattttgtagaagagcatacctcacggcatctttatgtttaaattaccttgtttgaacctggggcttgtgaagaggtttactttgcaggcatgtccacagatcgtgtgccagggccgcccctcagaacccgatcagtctttccagcctgttagttaatgaacatctccctttccgcagccacgtggccacagcacaattcagggaagcccagcaaatgcatattcgcacattagtaaactcagcattttttgatttccacaatatttcactaaaataatagaaaacacttccactgcattattagcaaagatactcaaatggtagctctaacttagacattcatgtgaagtattgtggcaattaaagttttaaaacaaaaagattacattttaatgtgttttgctgagaccagtctgatgaagtggaaggaaaatgtgtccaaacccttcccattagaatcaccactgtctactcttgcatgtcatttggcttagatcacccacagcatccctgcctgcattggggatgtgacggttaacagcaaacagctggacaaggacagcccggtgtctgccttcacggtgaacaggtgctacgcagtggcccaggaaggaacatactttgacggaagcggatatgcagctcttggtatgtgttagcaacactctcgaaggcagtccccgaatgagtctgtactctaaagcgatgtggatccaagagtataagacaggacccactggacaaggctgcaggaaaaccacattgagtttagtattccagttgattcctaatttcttggcgtaaaaagccttctcaggtcttgtgctatctggatggcctgacaaagtctcccccaaggagtggtgtgactcctgacagaggccagacatggggtgctagtttcatctatagtttccccaggttctgtaatgcacacttactgtccaagttaagaaagggctttgaattaaaaatcagcagcataaaatgtctagaccagctggcgccagggaggctgtgcagaagtttgggtggggaagagggggaagccagcagaacatctctcgttcactctgtgcttcctttctcctgttcctggggctcaggctccagccctgctgggcagccccctccatggcctcagctccccttgcaccccccagctctgggcataccatcttctccccttttcccttcagccctgggcatggtaacaactgcctgctgttgtcaatagccccacccagtgtggctcctcggcttttttatcacctgaattaaaaaagcattccattcaatccccacctttaacaaacttagtatggactctgatacactcagtaaatgatgattcccacaagtacacagatactaggaaaataaagtggactattctcggatgatgataaagggattccagggatcaaatcccaacagcccacgggaaagactgccgcagggaggacgtgtccacagggtgaggcagggccacgtgcttctgtggccacagatgaaggaggtgcctggctctgctctgacctggctgactgcatgcgtcttctttaaaagctccacgtcatctcccagatgtggaagccgaggctcagagggcaggagtgacctgctggtggggatgcagctggatccaaaggaggagctagagccaggtcccccaacccctagccaggaggccaaatgctcaacctgggcctggcagcgctcaccctgacttgggtcctccttgtgtgttacagtcaaagagggctacaaagtccagtcagatgtgaacatcacactggagtttcgaacctcctcgcagaatggcgtcctcctggggatcagcactgccaaagtggatgccattggactagagcttgtggacggcaaggtgggtgcttcctctccatgagggtcttcctccccccagtgtcagagacagagcaattgagaaacagcagattcaaattcacaactatctattttcatggagtcaaacaatggtcccattactattttaaaaacagatattgctacaagaaaacctttttggtttattttttaaaagcttttcaaaaataactttttatatgtttgaaagtaagctttcagcaaaattacaactataatacaaagaactttttttcctgaaccatctgagaataagctgctgacctgatgccctatcccttctaataattttttttaactttttatttggaaattattacagattcataggaagttgcaatgaaatgtacagggagggccccatgcaccattcacccagacccaggtttcccagtggtagcactatgcattttttttctttttgagacggagtttcgctcttgttgcccaagctagagtgcaatggtgcaatctcagctcactgcaacctctgcctcccaggtccaagtgattctcctgcctcagcctcctgagtagctgggattacaggcgtgcaccaccacacccggctaatttttgtattttttagtagagaccaggtttcaccatgttggtcaggctgttctcgaactcctgacctcgtgatccgcccgcctcgcctcccaaagtgctgggattacaaacattatgcatttttctagcacaatcaagatacttaattgtatcaatactacaaggctcccccttaataccccatcatggccacacccaactcctgtacccctaatcctaggcaaccactaatctgtttgctgtccctctaatttctgttttgccagtgttatataaatgaaataacgcagtaggtatccttatgagatcagcttttcacactcagcctgatcttgggaaggtcatctgggtggttgtgcatatcaacagtccgttcccttttgtggtggcgtattactctgtgggatagacgtaccatgctataatttttttttaatgtagaacatgttatttttttctgtgactgttctgcccttgcttttcagcctctcatgtccctctcctgctggcaacaaaatgaactccacaatttgcagtactagtcctttagtctcctgcttgaaaaccgcctccttcacagtttctcccagttctcacttcccttcctctcccctttggggctgtctgggcgcaggcaggatgcggggaagggagtctcgatggcccttttcctttctgtgggctctctagtggacagcagctgagccatagccatatcgtggtcttcagggcagcctcttacagtgagtggtctggggtctcagtgttgcccctgcatgggggctgctcctggagagtttggccagcgtccatttcagctcaggcttctcatcctggttgtcatgagtagtgccacctcttcatcttcccgcttccccgtggggtcatgtgcaaacttggggatttctgccaagccacacagaggccatggggaatcagggatggtgtctctctggtcctctctctacctaactacattttaccagcatttctgcagcactgtggtcaatgtttgttgttgtgggagtaagatgcctgaattttccaacactagtgcctcttggaaggcaaggaaaaagtctccatgttctagattccccaggacttaccggttgtttctggtatttccctacttactccccgctgggttttgacccctaggatatcctagagtgggggtggggaggatctgaaaggtcatgtctgaccttttgcccttcacctcttttccgattcatgacaaaccagaactaacttgatgtcatattgctgcctctctacactgacttacagccaactttttccctcatctatactttaaaaacttttgtatctatttgcatgtttttatgtgacatctaaaaaatgttaccagggccagatatggtggctaacacctgtaatcccaaaaccttgggaggctgaggcaggaggattgcttgagcccaggagtttgagaccagccagggcaacatagcgacaccccatctctatttttgaaaaatattttatttagataaataaaaaattaggaatgcaatcagaagtgtaattgctgcaaacaatgtaattttctgttgtattatacattttacttcttattggattattatgcatagttcttttttaacatttttagttgttacctaagggtttatgacatatccttaattgtcacagtccacctagaaataatactgagcagtttcatatatagcataagaatcttcaaaaagtacatttgaaattctttcctcctgtcttagtctgcttggggtgccagaacaaagtaccacagactgtgtggcttaaacaatggaaatttattttcttgccactctagagactagaagtccgagatcaatgtgttagtaaggttctttattctgaggcctgtctctttgacttacagatgcctcgttctccctgtgttctcacatggtcttccctctgtgcatgtctgtgtcctaatctcttcttataaagacacagtcagattggatgagggccaccctagtcactcatctttacttaattacctctttaaaagctccatcttcaaatacaatcacattctgaggtactgggggttaggacttcagcatatgaattttggagggcggtcttcagcccataacacctcctatcctttgcaaagctgagatctctttacttgctgtgggagagcatctacagttcatcagaagagagttagtaaatattcgctcataggtgctatcaataggtatgaccgggccaggtgcggtggctcacacctgtaatcccggcactttgggaggccgaggtgggcaaatcacctgaggtcaggaattcaagaccagcctggccaacatggtgaaaccctgtctctactaaaaatacaaaaattagctgggcatggtggtggatgcctgtaatcccagctatgcgggaggctgaggcaaaagaatcacttgaacccaggaggtggagtttgcagtaagccaagaccgcgccactgcactccagcctggacaacaggagcgaagctccatctcaaagaaaaaaaatgaaagtatgaccagcacctccagtaaggctattagctcctaaaatgtcctaaaattgaggccctcatttaaggatgcagtgtgctcagacttgtggtcatgaaggtggccatttgcgctttctggaatttggggactagtataacatctgaatcttttttttttttttttttttttgagatggagtttcgctcttgttgcccaggctggagtgcaatggtacgatcttggctcaccgcaacctctgcctcctaggtttaagcgattttcctgcctcagcctcctgagttgctgggattacaggcatgcgcctagctaatttttttgtgtttttagtagagacagggtttctccatgttgctcaggctggtctcgaattcctgacctcaggtgatccgcctgcctcggcctcctaaaatgccaggattacaggtgtgagccaccatgcccagccatcatctgaatcctttaaaaggttacttttcaaaactattttctgtttctcctagttagctctccttttaaacataatgctgcaattttatctactccaagagcttatacaaatggactgtgttccttaaatacacaaaaactcaccaagatatttgcttttaggtcttgttccatgtcaacaatggtgctggcaggataacagctgcatatgagcccaaaaccgccactgtgctctgtgatggaaaatggcacactcttcaagctaacaaaagcaaacaccgtatcactctgattgttgacgggaacgcagttggcgctgaaagtccacacacccagtctacctcagtggacaccaacaatcccatttatgttggtggctatcctggtatgtacgggtacctgctcttccactcaaaaggggcactgtccctggaggaagtcttggttcaggtggatgtagaatagggattgagaaaggtacatggtttgggtgacaaatcctttaccattttagaaaggctatttcaaatatctaagaattcttggataacttaaaataatctacatacacaagttaatcattgggtaagactgtgagaacattgggtctgatataaaggcagccgtatgactctaccgaagtaaatttcatgactgtcagacttgggagtcattttagggctagggaatcgttttaggaaacaaacttgtgactcatctctctggtcaattttggattagaattatgtattttagatgttccaaggaattgttgcaaataataaacacctgttgtatgactttttttaagttataactatgccttaaaattttatatattaaaagtttttggccaggtgcggtggcttacacctataatcccggcactttgggaggccaaggtgggtggatcacttgaggtcaggagtttgagaccagcctggccaacatggtgaaaccctctctctactaaaaatacaaaaataagctggacgtggtgacgggtgcctgtaaccccagctactcgggaggctgagacaggagaatcacttgaacccgggaggcagaggttgcagtgagccgagatcgcgccactgcactccagcctaggtggcagagcgagactccatctcaaaaaaaaaaaagttttctctgaattctgctagtcactgacaccacatatgtggaagatattctcctaattttgatagtgaaaaatttaaaaaataaaaaaacccgcttgagattatttctgttgcttttgtgctatggatcgcatttcaacaaaattaagcaagatttgtcttctcttctttcctgaacagctggtgtgaagcaaaaatgcctgcgcagccagacctcgttccgcgggtgtttgaggaagctagctctgattaagagcccgcaggtgcagtcctttgacttcagcagagcgttcgaactgcacggagttttccttcattcctgtcctgggaccgagtcctgaacttcaagcagaatcctcagttggaatcattgctaatattttgaggagaagtgtatgtgtgaattaagaatctcttcagttcatatttcatttccaactcaggttaagtgtttctggggagagatgttgtgtttacgttacactaaaaccacatgtgcaacaaatacctccattaaatggtctaaaatgtaaattgaattccctggctctctttttaaacgtatttttaaaaaaatctttatacacattgaatgttctgttgattacttgatagtattttatgtttttcattttgagctttttaaaaaagtatcaatacagatgataacagatca

SEQ ID NO: 85 - DNA, 125513 bp, Mus musculus
  source 1..125513: mol_type = genomic DNA; note = Mus musculus strain C57BL/6J
aggacagacctgggcgcagcggggcgcctttgggggaggtcctgggtaggacaggggcggggcgcggccaggcaggcgggggtgtgtccgaagggcctgcgcaccaggccagggtcgagctgggaagagcacactcgcgcagtgcctgtgagcgagcacgggcgagaccttccccaggagcgcagggagcggcggcgacaacatgcgcggcagcggcacgggagccgcgctcctggtgctcctggcctcggtgctctgggtcaccgtgcggagccagcagagaggtgagctccgcggcgggaacaccgctgaccctccgactggcgagcgggagcgtgcgggcgcaggggacaaagcgcggcgctcggggctgtggatgggcgcacgcaccctggcgcagcgcggacctgctgcgggccgcacggggctgcagggactccagcggaagccgcctccctgaggacgctggctgctccctggagctctaggctctggtttcctctgactctaggggtcacctgctttctagcttagtgggaccttgagatccaggagtacagtgggtggcgagagtggcgtgtccggcacgtgagaagggacactgactccgtacccaacgcctgagtggctgcggactggccggagaccgccgggttggttgattgtatgcagcgctcccgcaatgaatgggaacggagttctctggcattcacttcattgtcctgtgttgcagagagagaccatggaaggagaaaggccggctcctctggggcactagcatccagggtggtctagcgggaaaagactgatggagaaggggttccaaggtcagctgtcctgggcaactgggacccgcatatggcgtccaggacacaaatgtgttctctaaagtgtgctctttgtgtactctgtaaagtgagcaaatagactccccacgcgtgtttaaattatgtgcactataaattatggcgtaaggggctagaaaggtcggacagtgagtgtgtcggctctccttggaatcagtagctttctttacaaggttgagaacagaagccaacccaaagtgaattttcagtgggcactggagatgggaggtggagggacagagaatataccatgccacccagagttatctgcaagcccctgctaggtggtcacaaatgtttgtcgaaaacgtctcaatgtatgcaacaagtgacattgagtgtgttcccacagattgctctccaggagcacaggttaaaagtaggaggccgaactcgaaatgccctcgtgggaaaaatgtgtgtttgggcattgtgcagagccgtgagctgtgcaggctatgagcatcccattcattcatgcattcatgatgaaagcgctggaccgagctggaaacgcagctttgaatagcccggcggctgctcagctcaggagcgggggctgggagaggggaatttacatagttatcagggaaagaaaagagccagcctttgggagggaagcttttgacgctgagagcccaactcctgcctgtgaggttgctgaaagtgaccaaatcagggttctcacagggtggagaaagcagcttgccttggtttattgtttcaagacattgaaagtcttagactgaggagatgctctgaatgccttccgttcccctgagggctgggtgcttggcctgggtggttatgaatggtgtttggagaaagtggactgcgtggggctttcctgctttgagacactgcagaaaagctacgtcaggcagggcctttgaatcgctcctatctagtctatatttgccaacccacagctttcctaatgagtatccttggaagttttgttccctgtatggctgatgaaatggcatgatttactctctctctctctctctctctctctctctctctctctctctctctctgtgtgtgtgtgtgtgtgtgtgtgtgtgtgtgtgtgtgtgtgtatactagcctagatctcatgatgctgccctggttggtcttgaatttatgagttcaagtcattcccctgcctcagccttcagagcagtttggactgcaagcacgtgactacacctagtggggtgcttacagttttgaaactgatcacggatctaaaagcatgagatcattagctgttcctattattcctcggggattgctttacaactaacaatgtctgactccttggctgaaatgtaacctttaaagtgagatgtcctctaagtattggataagaagggttgtgtttccaggactgtgggtatgtatggctttgcggtagagcattttgtccagcctgtacgttcaaactctacctagtgcagcccaaaggaaaatccaagctgccgtgtttttttaaatgacatgctaacttcacagctgattatttcaattggaaaacatctaagagcagaatgctcaatttggtaagtggcatgttaagttctagcaggtaattagtcaaatggagttccttttctgtagcccgcttttctaagtacagggcagtaaggtgttactggagcagttagaaagtagggtctccatattaagacacctctgccctctccccacaaagcctgcgctcccaccttgcttttgcctgtttcctagacaatatgcatgaggtctgcctttgtagttactctgtatgtgtagtgagcacactaaggccagaaaggtgtgaagtggacagagtgtcctatgtagctcttagaagtgtgctatttcctaagcttggaagatgaagtgtgcatgtagctacatacttcattgtaacgatgctcgaagctccaggttgttcatgaagcccagtggatgatgctctttatcacttagagcaaattctctgggaagcaatgcaagcaataccttccacctccgggtacctagctctgtagcgttataggccactatccgtggtaaattactgatgttctctgtggttgagtttcaatattagtaaaatacgagtagtaatcatgtcttccaggaagcgatgttcatggttaactgggttaatgtagaaaaagatttccaaagtgcatgaaatacagctaggctgtgataaacattgtataggatgatgatgatagtgatgattcacagtgttatgtggggaaggccctttcccaaaccatattgtctctacactgttaaaaaaaaaatcgaactctgtatttggagttaaattgcattaggttcggctgctcaaatgtgttactttggttagccttgactttgttccttaaccttcgtgggggccaatctttcatcctcagtggaaagactagcttcagaacagttgccttctctacttggattttccctccacttccttgtggtattattggatgctctcgggttgactttctgggtacacaaggaagcatacttcttctatgttatgaccccacctatccttattccctgtgtaggaccaccttacgaactcaaattgttcccccatctcctcactttcagggtgtccacaaatgccaccatggtgctgtatcccactggggtaagcccaggaagctagaatgcaccctggcctactgtctcacagctgagggtcttgggcaaacccatacccgctcactgctctccagtgtctacccacacagactgaaaaatgctcccccagtctgcagtttgggtgctagagacctgaaagccttccataccctctgccccaaactccagggttacaaaaacgcactcaaggatgcatagaaaaaggccggtgatggagtccaccgttgtctttcaagacagccacctcctgctctttctcggctgtccttccagcaccaggtctctccttgggatgtttgagcaggagctgtttgtgaaagttacttctttggtagctgcgatgatggtttgtagttaaagcatggctaacggaggagacatatgaaccacaccctgacactgcccaccctgtaagagctacctccgtgtacctccagcagtttttaatattccctttactaatgtgtgctcttttacagtggtgaccttttatcttaacccatcttggacagacaggtgttatcagacagggctttctatacctttcaaattctaagactggattgttggtttaaacactgccaacagtgctattcacagtaagcagtgttaaagggctggttcttcttcttcttcttttttttttttccttcatttgcacatagggaattgatggacatatttgaggctacttctggcacagagaaaggaagttctggcatgattcagtttgatcgttaagggtacttattagtaagttctcagacgctatatgatgtcactgctactccacggcagacatcgagtaactcaactctttcagaagttattgttaatgaataaagtttgagtcttcaccgtgagtcctaacagtaatggaaggcaaacagcaaaacctcggcagcataggcctgagttgaagtatttgttagctctgctcttcaggaaggtgtggatgagctagacacactgtgggctcccaaggaagatagacacagcttatttacacacttgtaagggatttttttttccaacccgctttttttccaatataataatagacattccccagacaagcaagtaatcaacgcatcgcaaaattaatgagcaggaaaaaaatctccttcctagaagtttagttaaggtcatgaactttggttctgttggagcccgtcaggtagctacttcagcataaagcaccgcacaccagctgggttcattgcattcccccaccccctttatatgaggggatgacagtcagtgctcacaataagcgtttaataataaatagcgcagagcccttccacttggtctttgttttgtcaaggctgggtcaggagcgattgctttctctctcgggttaactggttcccactcttgcgggggggggggggggaggcacagacaatgggagcagtgtggagcttagtggacgataacattcttgtctaggtaagcatttatctccaagtgttaactcagaaacagtggcagaggcgtgccaccgaattatcagcatcgtgattttagtttgtgtgcacattaaaaaaaaaaaaaagtcattcatttgaagtttcaatccttcattccagaagttatctgtgcagtctgatctgctgactcagggggccgtaaattcttgtacctcttcaatctctagtggtaatatcgcctttagatcagtggcgatttatagacaggccagcttttcttattcctgaaggtatttcctgaaattattttttccccatggttccataatttcctgccagaaccttaggcaattctctgcaatcataaagatgtgaaaggacacattgaaaattgaatagatcatttttaatttacaaaaagaaaaaaaaaaaggacattctgggccacagaggtagctcagtggatgaaatgcatgctgcccctcctgcctgatgactgggagtcccatccttgaaactcacatgatggaaggagagaaccagtaagttgcccttgacctctacagatgtgctatgacaacacgcatgcgtgcatccatccgtgaacatgcacacacatgcacgtataataaccatgatgctggttgcaaggaatcacccaggaaatgtcttagacccttttgataaaaggtagaactttacttataaaaacgggtctgtctcaggtccagatgaaggagttcttccttcgcagcatccctgctctctagccattcatgccatctttctttccttaccactctggttgaactatgctttcctggttttttgttcttttatgccattgatccaacttgtttttctaaagttttatttctttcttcattaaactctcccccaccccacgtctgccttttctgttttcattagaaatagccattagctgcctgaattatctatcagccaggtgatctagtgtcatgccgcagttagactcatcctgctaaattaaccacccactgtcaccatatggcctctcccctgcctcttgagcttcatctcttgcctccctgctgtgacctccccccatactctgtctaaattcagccccaaccaccagccttatcctagcatgacaccctgcctccgagtcagggttgtttctgtctgctgcacagctgttgagaatcccctcacctgagctgcagtccagggccaacctcagcccatccctacatttacagcctgcagctcactgccttacagcttgggtcgactgcctcatctctaaatctgcactggattctgtgctaaattggggttcccaatacagtcacagttcttctctgggacacttttgggtggtttatccagaatgccattagccagagtaaaaagagaaaggacatttttcttacacttctcagtatttcttaatacatatggaaaatcagagtcctggctcttgggtcagtggaagtgaacaacagtaacacctattgtactccagcgtgcagataaagagttagatgaccataggcacttcctaaatccaatcatgccttttgttagatgtcccttgggttcttagtacttaaaggggtgaggggaggaagcgaaaactaacttcacatggaatacagttgttagccgaggtaaattaatcacgaggcgagctgttctcttaagatgaaacctctgtaaagcccaagtctactttatatgatccattctcagaggaaactggcaatgactagcacagaaaagatgtcggtgaccaccagagcaagggtgggcgtgacgtttgaggcctccggtgctgaagttgcagatgagccttcagagttgcaaagccaacaaggagaatgggatcctctcgaaatgtcggtcaaactctgagcttacacgatatcagggatcagatgagatgtggtacacattccaaagagagggatgctcactgcaccacctgtgggacctgaaaagaagtctgctcttgaacgaagtagaaagactaagcttcaaggccaaaccatctagcaagccactcatgggttcaggacgtttaaagatatgtacatctccagagatggcacagaaaacccatccctggctcctacatggccaactcagccctgtgcctgactcgtagagctttctagatttcctttgacccaatagataggagccagaatttatggatcaaacgttcttattgactttgatactcagaggcaccggaccctctttcatcttcagttccaccctctgaggtttctagtttaaatatttgtttccagaaaaatctccgtcacttctctgatcttctgtactgtctctgtgtcctgggcatgggtagcattcgtctcccaattctgaaaatccctaatctattctgttttagtctagcctttctttgcttttgaaggccatgcttctccgactcctaccactctctctaccccaggctttacagaaagcgtatgtttagtctagaagttccgaatgggtggtttcaaaagttctgcttttgggaattgcttccactttcctgtaaggaataaacagtttcttgcttggttttgtgttttgaaactgggtcttgcatttttgcctgggctggtcttgagtttctgagctgcagcgatcctcctgcctcagcttcccaagaagcaggactgcaggtgcaaaacttaataacttccttaagagcagaacaatactcagtatggggttgctgtcatttctattctgcttgcttgtttcttttctgtgtcttactccttcatacctgtgtccttgcatggaggtcatgttggagcgatgtgatatggcatatcttggaggttttgtgtcctagctagttttatgtcaacttgacagatgctagagttgtctgaaaagagggaatctcaattgaaaaagaaattgcctctataagatctagctttaaggcatattcttaatgaattattgatgggagtgggcagcccttagcgggctatgctagccctggtttggtagccctaggtgcttatctgaaagcaacttgcgcaagccatgatgagcaagccagtaagcagcacccctccatggcctctgcaggttccagcctgcttgtgttcctgtcctgacttccttcttcgatgaacagtgatattgaagtgtaagccaaagacatcctttcctccccgagtttctttggtcatggtgtttcatcacagtgatagcaaccctaagacacagttccctgctgccttctttgctgtttgtgaatcaacagctgtgaggacatttctcgtgatctatctggatttgctttcgagcctgtgaggctcaaaagtgtatgatgtttctgtaacataattttcaagaaaggagttgagggactgagtcccaggtagacttgccattcaggtttcatagtcggctcttgcctgcaggctgtgtcccgtgtctctatttccttctccttgaagaactcagagctgcaggctctttgggtgccaggagagcatttttgaacagtttcatacaagttcccctttcagtttccacataagactttaataacacagatccccaggtcctaacccggggattataatgtatttggtctgagatgggacctagtcatttcgtttttaaaagactctcttagctgattgggctgtgctaccaagattaaaaaccacccagtgaacttgctgtgtggcagacgcagtagcagggggtaggcatcctggacctgtagagacctcttactccttggtggggcgaatgtgtctgtgttgcctttgttcctggtgggctgctcttttttgttgttgttgttgctcctatgtttaagcaagcagagttccagcttggcttgactgactcagcaaagtcctgatttcaaaaatacttttgatcaagtcacagggtccctcgtgttctgggataagatctggggggtactgtaagggactgatggatcgactgcaacagaatttattaaatacattccacattccagttcttttctcttttctgcctcgtgtcccttctttcctgtcttttgttttgttttggtttttggttttttgttttttggttttttgttttttgttttttgttttttgttttttcaagacatggtttctctgtgtagccctggctgtcctggaactcactctgtagaccaggctggccttgaactcagaaatccgcctgcctctgcttcccaaatgctgggattaaagacgtgcgccaccactgcccgacttctgtttataattctaatacctcgtccagcacccagcagcgacagttctggggggactgatggacgagagaatgccccagtgcaaacagcagggtctggagaggagtataggggacatcacttagacattcagacagataacagggagatccaacctgaataatagccttctggaaggatcgggctagcccagggtggctggaacctctgagtcacccagagaggccttggagagagaacagggaagagtcttgctatcagtactggggcagaggtgaccaagcagtgttgagacccaggcctgagttcaccatctagagtagcacacacgaataggaatctcctggaaggagaaaaactgtaagaaatgctttggcttctactggggctagcagggactctcaggccagccaaggtagccaaatgcaagagctccactcaaactcaataagtctctgacttagaaataaggtgtggaggggttgaggaagatacccggtgtagacctaattcacccgatgcacacacatgcacaacacatgcacatacaggcacagacacggagggagtgtacgatgcattattcttgccttctgcgggtgttattaaacattgctgttatttatctgtcttattaaatctcccaccccattccttcccatgtgggagagtcctcaccctgggtgaatggccctgcctttgccctcatacaatcttttgaaaaccccctttgccttcttctgtctcctagatccaaactgtctggtgaagcagaaattcaaggtctaagacacccaagggacagcttagcaatttctccaaagcagccagtcaggaaattatggcagcagttgttttcaatcgatagaacattttgggaattactgcttagtgccgtcaagtctcattctacaaatcacatatttttctttgttcatcacagtctttaatttctctcagaaagtttctgtcctctttggtgtattggtcttaaatttatttcatgatatttgtgtgtgtgtgtgtgtgagagagagagagagagagagagagagagtgtgtgattgaatgtatgagtgtatgtttatatgtatgtaatatgtctgtgagtgtgtatttatgtgaatatatgtgtgtatgtgtgtgtttgaatgtatgagtatatgtatatgtatgtgggtgaatgtgtatatatatgtgtatgtttttgtgagtgtgtgtgtctgtgtgtgtatgtgtgaaagagagagagagggcatgtgtgctttgatacaaatgagtgacagacacttggtttaactgtgagtgttttgtggggagaagactgaggcttcccaacagattgtcagaggtctctgtttatagaattgtctttgttttggagcctttaatattttgttctcctaacaataagcgacagatctttgtttttatgagatctctctagttcttccaaaggtagtccatcactcaggggattgccgattggaacccaggagtaagtgtctggagttctggttaaatagttccagaactgctgaaagaggcaagattttgcagatcattctggtgaggtttgtgccaagcttcgcaaggctggttcaactcagtgtcagagctggagcaaagcccacgaggtctactcctgtgatctcaaagtatcatcccctgggaactggttaggcagagagcctggtggccctgcccggcccactgattcagcagacctgcaggcgatctgcggaccctaaagcagagacttctctttagctctctagcctctacgcagtgtccgcacctcttcctcacagccgccgatcttgtttacggctggggagggtcacctttcgtagcgttcattctataaagagaaatctgatccatatgggggtgtctttcaagtctctttaaggggtttcctgaaaatgaagaacaccaaacagtatgtatatactgtttttccctgtgcatgtgctatatattaagtttaatttataaaacaggcttggcaaaagatgaatagctgccagtgataaaatggagcatagcagcctaaatgtaaagtctgagttgcgtagagggagaatgtgagagaaagagctggagacaagggatcagttcctgtaacatgtgtggtcatgtgtgtatgcttatgtagcatatatgtagcatgtgtggtcaggcgtcagctttggcagctcagtggtaggggacaatgcccctccaactgagaaaacgcagtgtcaccgaggccagagggaagaacactgagatcgcaggaaactctgggaacttttggctggagcatctgcctcgcttagtaagtctgtgagctacggttccacagggtgacagccatctctaaaggctttcagtttgtaaagtgtgtgctggctaaaaaagcagggacaagctggaaagtccaggtaccttttggggggactgtgggtagaaagtacagcccatcttaaaagctgaatgatctcattggtcactggcgcatggactctggaaagggtaactccccccgccccccactgaagttgtcgccaggcgcctgcataatcacataatttgaggatgcagggcaaaatgaataaggggaggcttgtttaaattattgaaaaggccaaggccgttcaggcagagctctgcacagagggcaagcatgcatgtgaccactcagaaagccaccctgggcacgtgcctgcgatcacatcaggcatattaacaatttcagtcataaacaagagtgcagaggtggagaaagaatgagaaagatgtggctaagacctgacgggctgttcgaaaggttcatggagaagtttggaggacgttggggctgactagaaaatggtgaattatctggacatggtggctgaggcctgtagtccagcacttgggaagctgaggcaggaagagctgggctttgaagccaaccccaggctacaaatcacgagtctatctttaaaaaaaaagttgatttttttttccaaccaaaacttgatggttttaagtaacaagtgaggtagattagtgagtgtaaatgatccgagctgctgggtggtgatggtgcacgcctttaattccagcacttgggaggcagaggcaggcagatttctgagttccaggccagcctggtctacaaagtgagttccaggacagccagggatatacagagaaaccctgtctcgaaaaaaaaaaaaaaaaaatccaagcaagccacacgtgccttagttttagtaggaaggggataggaaatctctgtgtttaactccaaggccccagttgctctgatgtgctagttaggcttctttctctaaggacttggaaggaggaaggggtgggcttccctgctcagtcaggacgtgaagtttgggattgtgggggtgtggtgctctctgtgaagtaatgacttggattgggcaggatgttgagattactgtccttggcacttcgagatgaatggagtgtgtgtgtgtgtgtgtgtgtgtgtgttctctgcaaccaaacttaactgctgaacccaaaccctcaatatgaccaaatacaggcattaaacaaacaccacgctcgggtgctgaagagatgacccagcgcatttgctgtgcaaccataaagacatgagttcggttccctgtcctcacacgatgccaggttctgaagcacggtctgtaatcctagtgttcttagggcaaggtgggagtggagatgtcagaagcccccatggcagctggcccagtgtgtacatagagacagatgagaaggagttagtccagactgatgcccaaggatgtcctctgacctccacacctgtaccatagtatgcatgtgtacacacacacacacacacacacacacacacacgtactcacacagagataagcacacacacatcacacacatgtacacatgctagcacacatgggcacatacttgcacatacacgtgcacacatgtgagcatacacaagcatatatgtgagtacacacgaacgtgcacacacacatgagcacatgggagcacacttatgggcacatgcatacccacaacatatgcatgcactcacatatacacatatggtgccagtttataagagaagccccattaggggcccggcgctcactactggacactgtctcctacagacagcatttgtgcctagcttgtttttaccattcgtttatcaacagtaggaatctggctttgtcaaggacaccttgagagagttgctatggaaatgggcttttagcaaagccctcctcctgccttttgctcaccacccactcctgtttctaagatcaaacttcttttcatcgtcccacaggaaagagaaagcaagtccagcgtgctttgtgctgtgtgtgtgctgactcccaggatgctggccttggctttcccctcgctgtgtgaatcacttctctctctccttccctccatcctcttcctcctccccttcctcctccccttcctcctcttcttcctcttcttcctcctctctctcctcttcttcctcctcctccttcctctctctctctcctctctccctctcctctcttcttcctttctcacctctttttctccttctttcactatcttccatgtccctctttcttttttttcctcctttcttcccctccttttatctgttctccctcgcttttcatcctctgtctggctttgttctacactgcagtgggtcctagaacctcaaacctcttcttttactaaactcaccagtgattaaattgcttttcttccaaaaccaatcatttgcttttggagcaggagagttttagtagaggatctttctctttctaagtggctctgtccctagagctgatacaggtcacctttatttaaagaggaaaaaaaaaaaagcactcctaaatgtgggctgttcctttatctgagacataaaatcactaactagtaactttaggatacttgtccttgaaagtaaatggcctgatttccattagacaagcaatactgtcatgtttatttaggcctatgctttgatgttcagcgtttaaaccatgtgaaaatactggtctttgatatacaaagcaagatcatgtggtaacaatttaaataatttttactttataatgaacacagttatgaccacttaaccacaggtctgcactctgggaagggcaccacagggcagcttcctcctgaggcacagcaggcctggttgttgacacagtcaagagacagtaaacaagaggacgtgcgaggctgtggctgaggtaacagggtgcactgtcccacagtgtgccacatggttaagaagtagatggtatgcactctaaaataaaaggtaggaagaaatgtcgagggtggtactatgaagacacagactggcagcagtcattgtaactcttcaataattgcttgtacagtgtcaggatgctgtggcggcaaggcagtgttttcattgccagtcattttgttctgtcacagcaaacattagtctcagactcattccttggccactaatccgacagtttcattcttggccactttgatgttaaaaagtcactccacgtcagcagttctctaagacgcactctgcactggacccggggagtcagtaaagtgtttctggtgaaagcatgagggcccaggttcggatccccagttgccgcacaaaaggcaagatggggcttggcacacacctgtccttccactactgctgggccagggtggagacagacagggtcgccggtctcactaatcccgtgagttccaggctcagtggtcttaaaagtgaggaaggcaggccatatcaacctttgcttgcatgtgtagaccccctccacgtgcacacaaacacacaagcgcgttcacacacatgtacacacacacacacacacactcacacatactccaaaagagcttctgcttcatcactacttctaaccaggtgtatgtgtgtgtgaaggtgcttgtgtgcttgtgtgtgtaaattgaggactaagtaacagcacttatgtgacttcactcttactaatacgctgttgaaagcatacagggaatgttgacaatgtggcgtgtgagcaagtggctttgctctggtgtctgttacacaccagtgagctcctcttcacctcactgtgggcgtgtggcctgtggtcttgtcaggttttctttagcacttttatcttgatgctgaggctgcttggtccacatcactggcacagaggtttagcttttcaacacactttcatcacacacaggggcatctctactcttctcttgaggaacaataatcgacttagcatgacttctgaccagcttgtgattatcctggagtacaggcatgggatgtgtttctataaataacttcagtgtaaccctcaccctgtcatctctccttgagacccacctggcctgggacactgagcctgtgttagacattattaaaatatgtccaaatatcttttattgttaatgataaattctgttactttatacagtgctcactccttcattttcttataaattgttcaatattttgtacattagcaaagatgatagggatggggccaatcggatttcctgtcagcaattgaagtcgcacttgcggctgagctatcctgagcaaaatacctctggttccaacaggctgacagaaagaacagccaagtatgtcttagatagctatgcaaagggttgcagctgagtgtccaattcttgaaggcacagcgccggggctgtcagaaacaactgctcacaaacctggatgaaccacggtaccctggccagatgagaagcacgccccctagtggaaaaaaccatgagcctttatgactgcaattgatccaaaacaaatggctgtgttttgtgaaacacacaaatgagtccgccatggtatgaagaagataaggatggatgagtgggtggatggatggacaggtgggtaaaaagacagacagatagacaggaaatgctcaggtcaccttaaaaactacttgtcaagtcttcaaggcagtgtcttggaccccagtgtgagtggtgtagaagctgggagctttctttcttatctctgggttctgcagtgaatttgtagacatatcctgggtaatcgagagatgaagcaagaaagcacttcataaatgaagattaaaaatggtcttgaatacttaaaaaaaatcacaaactttaatttgggaacgtgaattattctctcagatttttctgagatttgaatcactgactttgacttttgtgaaagttgcctttgttttccaaaaggaagggcgggcactatgccagtctaaaccatttaattattcaactgtataaaacattcccaatcttttgttttattctaggaaaaggttatctgaacatattaacaggttcctctaaataggaattttaggtcctcttctttgtggatggtcacattaattttttattatatattagataagtacagtattgtgtggaactcaaaacctttttctccccaagatagaaatgcatacttgtacacacttgtgcacaatacaaatgtgcacatacttgcacacacacttgcacacatgtgcatgctggcgcacactttcacttcgagggccttaaggactgactctgaattgtttgagaagattccgtgaagaaggtgctgtgatgagctcagtcaatatttgaagatccattaagatgtgaaaacactgtacagggaagaactcagaagcttctattaataaattattaaactactagaaatgtctgggacaaagttatggtaattgcataatattactttttgtctataggttggtggcaattgcttttaacctaatcttagttaggggactttccactccagcagcccggccctgaagggacttctagggggccaggtgtgctcgggctgtgaagaaaggggccgaaacaggagcagccagcaagtggggacgcatgtgtttcatgctccgaagggtttggtataaccaagtttctcggtgctgatgaaatgcatagacatgtaacttgttctgcagtgtgtcctgaaggggaggaaaaagaggttactattgcagtagaaataactgaaggaaattactttcccaacagaaatgtagagtctagcttattaggcatatggtgcacttgacatctatcttgactgcttctatgcaaagccagccttgccttctcagtaggcctgagtggatttcctaccccttcctctagccatttgatgttcacaaggtcagttgccctgggttgaagtatttcttgaatacttgaacaccagacttgaagatgactcagtggctggagagaacttcaaacatacatataaacaaatatcaaattcctactcaaattgttttctccagtctctaatgctggctttctttaatctttaaagatgtgacaaaacgcaatatggaatgcgatttagtctataaggtggaattaaaacatgctatgtgaggagtagtttttagccactctcaggccctggatccgctgatttgagtgctcccatgatagtcaaactgctgggtaattctaattcatgtgtaaagactctctgagagacttaagttttgaaaatatatttttgttaattctttgaaaatgttgtgcgatgtattttgaacattctcagcacccttccacccctcccactccttcccacctaccttcaagagtgcttctttctctaccaagtctagtttgtgttgtccagctagtcttaagattaaagcctgctcaggggtgtggtcagcctatgagggggcatgtcattaaaaacaaacaaacaaacaaacaaacaaacagcagcagcaaataactgtctgtcttcttacagcaggcccagggtagactgatgtttgcaacccagcaactctgtcatgagaaccatttttgttttatgacttaaattcctaaatttttatgtgaaacaccataggaaatagtaggtagtactcaaagatcaaagaaattaaaggcaaggattccttctatagaattaatgcaattgaatgttattaaattgaacataaacattttagaaataatactgatcctgtgtgtgtgtgcgtgtgtgtgcatgtgtgcatgtgtgtgcctgtgcgtgtgcgtgcgcgtgcgtgtgcgtgtgcgtgtgtgtgtgtgtgtgtgtgtgtgtgtaggactgaggatgtgctaggcaaataaatgctcgaccactgagccccatccccagacctgactaagttatttacaaggagcacgtgacagtctgtgatccgggaagatgagaatctgtggagtcggaagctcggcagcaggctaagcgcctcgcaggactgtgtacacggtcccttcctgcaggtttcctcctccaccgcgtgcacactgtaatttctggatctttatagcctcttcgctgcggtcagcccctctatcaagataaagttaaatctcagaagaaccctcgtgggaaccctgccctcagaattgtgcaaacactgcttctgaatgcttggaacctgccacgcgtccagctgcttcgagataaaaatcatcaagaaaaaaaaacgggacaaaggcagagattatctgtgccgggggggggggggaactgtgaaatttggatctctgtgttctgaagttttcttcacacaagaaaacaggccatctttagggagaaaagaaaatcacacaaaattacagggaagacccctgcaagtcccgccagaggcagcaggcggctggctctttctttgaggcgggtgggcagatttctttggacagtgtgtgaatgtacaacttgcctttaaacacattgtttcaacattttaggaggacaatggcaatcagaagctagacggatatgttgagaacctggattctctagctgtggttagggacaatctctatagcaaccaggttgagctttgatgcatctcagaatgaactgaaggcgtaaggatatcccgcctctaaccactgatccaggttacccattaataattgtttttgttacttcagataaaatatacctgcggtaaaatgcccacatcttagtgtattcattctgtatattttcccataatcacatgtgcctaagaagtccagacattgagaaagatacagaacatatttattccagaaaattccttcttgtgttctgggtctttctcacagatgtgtcctgtctcagagtttcacatcagggagacttttgccgctcacgtgcccaatcttggtggaaggtcccttcattcagcctgtggatttccagtcttctttggatctgcctatgaggtgggctacacagcttgtcttgactgattttgcttttggactttggctttcaggcttgttccctgccattctcaacctggccaccaatgcccacatcagcgccaatgctacctgtggagagaaggggcctgagatgttctgcaaactcgtggagcacgtgccgggccggcctgttcgacacgcccaatgccgggtctgtgacggtaacagtacgaatcctagaggcaagtacagctttctattcatagagactcacctatgagacactttatacaacttctctttgcgggtgcttggatggaactcagggctttgcacatgcttagcatgagttctgtctttgagctccaaccccaggtccacccataggaattcatacttttggaagcaactgaagactttggctgaaaaatcttccaacacagctcaccacggctgatcttcctctgcactgggtgggtttggcagtgtaagaatgaaaatccaaagttgagagctacctttttgttttcttttaacagagcgccatccgatatcacacgcaatcgatggcaccaacaactggtggcagagccccagtattcagaatgggagagagtatcactgggtcactgtcaccctggacttacggcaggtaggttgggccaggcccgctggagatggtccaaagcactctgatgtatgccttgttttggtttgtttgttgtttgtttgtttgtttgtttttgaacacatttgtccaggtgttgggtaggtgatacatagtattatgtggtagcacttcttcacctatacggtcctggtccaagcctagagtatgagggtatatctggtcgggcctatggtatgtgtgtgtatgggactatgggtaggggagggacagggacaggtcctgacagaaacctaggggttgtttgttgtgtaggcagctgcaacctgactagactggagctctgacgtaggagctagactagatctgaccagttggggagggacaggcggactcaccagcttgaccctacagaagagcatgcaggaggaccaggctgggcagagaggttgggtatgaagtctggatgtactttcttaggactttgcacgagtaactcctgctcgtttctttctctgaatagcaatatttaagaagccctggtttgggttcgaccatttgtaaaaccagtgagatttgacatatgtgctagccttgcttttaaggaaaatacaagtgtcttggtctagggtgccatagtgagggcagagctgaagtttgcctggtagtgtgcatgtgaattcttcttgcctttagggtgtgtaggcaccacccttgaggaagtgatgccaccctcagtgagtattttgggtactcttaaatcaaaaaataaatcactctaagagagaatgcatattttatgaatcttgactattatggttatcaggattattttaggtcctgctcactgggttggaagtgtgtttcccatgctaatatttctcagcagaacagaaggatttctgatttgagaaatactgtattaaagatcaatatgcatcagagaaatgaaaaccaaaagcacaagaagctaccatctcacacccattaggataactcttctaaaagaaatggaaagtccccaagtgtggcagggagttgaggaagagagagatccttacacttctggttggtgtgtcaatgatgcaggaccagggaaaacccagcggtgggtggtgggtccttaaatatttaaaatgcacagtccgaatatgctcagctcttcccccactccaggtctataatccaaagaacagaaagcaaaccatcacggttacagcagcattggtctcagaagccaaagggtggtgaccactcagatagatgtccatcatcaggcgattggtttaacggatggcagcacgggcacgtggtgcatgcaaacacacacacacacacacacacacacacacacacacacacacacaccattcggcccttgaaagcagatgaaattttaacacttgaagtcgtgtgaagtggcataagacacatgcagaagacgaaatattgtataatttgcggttgcaggtgctgaaagaaaaaaaaatgggagttagtttctgaagggagtgtcagatgatagtaagaaggtcgtttgggtgcatgatggtgatagtgaaaaaaaaaaaaaaccatgaattaatctggtggaatcatttgattcaattggctgaaatggcggtttgaacgttacctatagtttatcacagttaaacattcttccacactgtgaaaggcatggtgtactgtatcagccaggcagcaggaagcacatgagctgggcatggagagagaggcatattcaatgccagaaattggttcaatggtattggagaactgaagggggtggggtggggcagaaagtctcttgagctgtgatggagctggagggaccaggggaggattggaactgttggcatctggttgagggagaacctccccacaccgactccgtggcacagtaggaggctcccctgggaaatcctggagagttgcaactggagtcaactattgtagctctgtcagtggtttatctgttggactgagaccaagaggaaaagccaggtgacaggcgccatctggtagcctccctctgcagggtccccagcctcttgaaggagatgcctggtgttgttcagagatccagtctcagccccaggagtcagaatccaggggagactctcagttgttagcagctagacccacctaccccagcaggtgaccacttgctgtgtccctgcattgatgcaagcgcagagaagcagctgtggcttccttggaacagcatcttgtcatggtggtcagccagattgcaaacccattgaaaggaaaatggaaactttggagtcttcctggccaaatcatgggctaacttctactacacctaggactaggtgcccttggatctcagctgggagaacttgtcaggcaggaggactgaggaatcccagaaataatttcgtttaatacgggtatattatattaccttgatgttgattggttttggtgtggcatagtggagatgcagagagtgaccccaaggcagttttttttctttttttacagagtgtgatagcattagaagcaatagtgtgcccaactaactcctcactgctataaacctcaatttgtttctttatctgccccttctctttgtgtgtactttgtgcatgagtgtgtgtactgtgtgtatgtacatgtgtgtgcacatgcatgtgcacatgtgtgtgagtccatctggttcacaggcaagtgtgtgcacaagcatgtggacactagaggctgatgccaagtgtcctctttaaatgctctctgccttgccttgttgagtcgtcactcccagaacccggtgttctctaattggctcagctagctggccagtgagctataggatcgacctgtctctgcccccttccagtagattatatttctgcaccaacatgcctggctcatttccgtgtgtgctggggactcagctcctcaagcttgtgtggcaggcactgtatagaccaagccatctaaccatagaccaagccatctaaccatagaccaagccatctaaccatagaccaaaccatctaaccatagaccaagccatctaaccatagaccaagccatctaaccatagaccaagccatctaaccatagaccaagccatctaaccatagaccaagccatctaaccaccccatcaccttcctttctctgatcttcagacaccagcaggggaaatgttaaacaagaccttaaaataacctaattagacttactaagaggatactaaaagctaaaaagaacaaaacaaaaatggaaaaagaatcatgcaaatttttagaaaaacaaacttcataagtcagtgataacttttcagttttggagaataaaatgggttcgttgtaaacagacaattccggttagcgtgaggaggcagagacgctcgccatctcttcacttttttgataacaccataaaacggtcccagcttaactttcccctttcccctttccccttccccttccccttccccttccccttccccttccccttccccttccccttccccttccccttccccttccccttccccttccccttccccttccccttcccctttcttctcttctcttctcttctcttctcttctcttctcttctcttctcttctcttctcttctcttctcttctcttctcttcttttctttttgctctatgcatttaataaccccccccacacacacagtgttcacacttctggcactttctacctcaggtgtgtgctgtgcacacctctgctcggggttgtgtctctgaactctcataatcacactccaaaccccgagtcagtcagggtcagtcactgaggcctgtgacagaagactaaactgaacttagagcctgagggcaagagtttgtgcagctccctccaggacaggactcctgcaactccagtggctggaggctgtcattgcatggcaccctcagaccccacctttctccagcagagattccgggatgtagaaaattgtatcttgttcttgacttgaacaatataactgcaactcactattacagcttttaaaagctttgctgtggtcttccattacagttgcccctcctgagcataagagttcctgggcatggttgggttgttttgttatggataacaatgggggagctctcagttaaacctaccgacctcattccctgacaaagagagaatgaaccgaatagaaaccatctcttgaagcttaaattccaagtttcccgtttagttttgagggtcgctttaaaaggagtatttttttattggccaatggacagaaatgtacgggtgtctgctggaggctgcttcgagatttcttcctcagtgttgtcctgtcgtacgatgtcaatgtccaactgtcctgcgatgaagatgtgctctcctttatataaaggaaagtgtcacaggatagagcagccgagtcactagcttgtcctcaggatcagtagctccacatggagaagttaggttcaattcccaaatctgagttccttctacactgctggtctccctcacctgatctccaagcactgctggccttcaagctatgacacggggtggccgtcaagggtccttactttttttttttttcctaactttggcgagctgagctgagattctggcccctctctgcttctgctgctgccctgccatgagtccactgggatcctccaccctgcaggtctgagataccagcgcttctgtgtttcggcagtggctgatagacttgggtgctcttcacctcatagtgttgagaatacaaattgaattggtgcttttgtgtttccttcaaaagaatttttaaagcctgctcaaatattttcaccaggagggtcggatctatgagtacaaaaaagaaaaaaaaaatccttttaaagataaaatctgtttggagagaaaggaaacgttccctgcggcaccaagcgaggagctaggagcgcctactttttgtgtaggtttaattaggaagtgccacttagttgtgggaacaggatcacagaagaacctttgttgtgtgcaagcccttagactagagtcgctggcttgggggagttgtaaagtctcattagtttggatgtccattgtgtttcgttccctcaaatctcagataaattgatgacaattaggtggtttttactgctggtacacacacataccacaaacacacatacatatgccacacatacatacacactcacacacaccacacatacatattccacaccatatacacatacatacatacacactctcacacacaccacacacacatacacacatatatacatcataccatacacacatacaccacacaatcacgtacacaacaccacagacactatacacacatacatactaatatacatacatacactcacacaccacacacaaacacatataccacaccacgcacacacatacataccacacaatatacacacacacatacaccacacaacacatacacacaccacacacactcacatacaccacacacatatacaccacatacatacacatacaccacacacacacatacataccacacaccacacacacatacactacaccacacacagcacataccacaccacacacagtcacacaccacacacaccacatgcacacacacacaccacacatgcacacacaccacacatgcacacacacacacacacacacacacacacacacactttactaagtaccctgagaaggtccataagaaaacaaactgcattcttcagacaccctgaaagatatgtagatcttacctctaaattgggcctttataacaaatgggtcttggctttgggcattaaaaagagatttctgcagggaggtggaaggcttatccttcgaatgctgcgtcacagaagcctctgttaccactcgctgccataggacagggtgatgctctgtgcatgttcatcctgacctgtccagttttagatataacgttgtctgtctgacatctgtttgatggcttagaagtagccctctctgctcccgctgctccctggggatatctcttctgctctattctctcccaatacccacacagctcaatgttagttagccatgtctaccctcttgttttattccccacacatggcgactcttccagttacccaaccatgtgtaagaaatcgaccttggtagctgtggtgtgcccgtcagggacgatcagcctattgtttgggggagtttggcaaacactcctgttctctcttttgggttctgagcagcagagccttggacatttcatctgtttcaacgtcagcttttctggctgggacctgagtgggattctgggggaagtgaatgaggatggtttggcaagagtcttttgcaatatgcttttcccattcccaactgtttgccattgaaataaagcgccctgtgcatttgtggacagaaatggaactccgccaaagggagggaaaaaaatccttatttatttattttttcggttatactagggataaacaaagattgtgatttctgacaaaatttttgagacaagctttgcagtttggaattcattccagctttccctcctaaccccctttggttcaaggggtctcactgtgtagccctgagttgaggtggatcatgctgtctagagcaggctggcctagcgcttacagagcctgcctctgcctccctggtgctggggatgtcgactatgcattagtaacctttttgcttgcagtgggtcattacacagaaacgcctcactctgatatagaagtaaaagccatggtagtgacaggagcgttaaacaaattataagacaaacatttgggagagagggctcagcagttgttccccaccccccaaccccatataaatcccagttaggcgtggcaacctgcctgcaactccaaccagggaacacagagacaagtgattcccagagcaagctgtttagcaggaataagtccatcagtgggctctgggcttgactgagagactatgctctcagtcagtgattgagggaggacgatagcaaccctgggcctcgcattcataggcacacacgtgagcacttacccatacattacacaaaaatacacgaacacaggcacgtacagcccacaaacacaaaggaggcggggaaggattctttttcctaatcactgatggttttaacagcgagagctccttccgagccactcttcatatttgtgcctactgtgcacattcagtgtgtcacagagttgctgttccacaggttctacagtctcaggatatggtgacacacaagacaattactgtatccatacaaaaccctcggcagaggaaaaagtaggtttctcagatatactaacctatatagcaatgtctcctttgccatcgatgtggaggagagctggtccctccgggggtttgtcctctggtgttgtaggaggcgggtagcagttagcttctgctctgtggtgttgcagatacaaacagaacatacaggaaggggcttatggggatctcacagaaggactcactgtaggaaggaaggaaggaaggaaggaaggaagggagggagggagggagggagggagggagggagggaggatggaaggaaggaaagaaggaaggaaggaaggaaggaaggaggaaatgaggaaggccttgcaggggacaaggcagaagctcagaaaaggattgcagtagcgaaagtgcagcatgtgtgagctgagatagcacatccgatcctagcagtttctcttattttcctgcccaggcagccaagcatctgacccctattctccaagggatattgacttcatcaccaaactatctcccaagtatcaggataccgatcccaagccccagtcccttatagggtgtatcacataggtattaatgacatcctcgtgtagacttgagagcgttactagctcccatgggatacctcaccagtgcgaatgctgtgcagccactaaaccatattgctagagataaggaaatgtccgcacatgttcagatgccgccatcaaagcctgaccagagaacagcaagacatgtatgatatccagtggtgtgtgcaggagccagtgcagctctgtggcaccgcagggatcctagcagttggcatctgtcatcagcatgatgaccagagtctttaaacagcagagtgctgtgcccagatgtggagggcttgctatcagctgcaaacagtgaatcccacagaccccgagtatgtagttggatggcctttgacagacaaagaggcacgatgaagccgtgtacttatcaacggtgactatcctcgtcatgtcatcccagagcactgctgccccttcccaggctgttacctattggcctcatcctcttccttcaccagcctctctgcttcccccaccccaccccccatcccccacccccgccttccatgaggtcacatgatgatatataacttcctagcaatggggtcacaacccgcatctggcttctttcctctgggcatcctgtgctggtttgctcctttcttctgagcatcgttatgagcgcaccgacctttgtttattctttcctggtcagaggtgtttccagcttctgtccattgtgtaaaagcgtctgtgggtgttcttataaaagtcttttcctgggtttatgttttctgcttttttcgaggagtaggattaaaaagataggaatatgtttctctgcaagacaaatgagtaaaccttagctcataaggtggctgcagcagagattgcggaattgtagctcttcttctcgaggtctgggtgtcttacagctcagaacttaaatactgcctctcatatacaaggcctttgttggttgtgccaggattcggcagttattgctttatctttatgaccataagctaaattcctgtaacagtgtttaaagactaagcaatactttattatataggttcataatgctttatttaatgtgttttcagtttggggccactataagtcatacatgaatatttttgtggctgcggtgttgatagctctcttgtagagtcttcagtaccaaggattggagctcagagactttcgtctgctacaccactaagctaccttccagccttcaaatgcagtcttcattagtttggattttgtttttcttccaaaaaaattttttgttcattttacgtgtccgcggtgactgacagtgttcctcacaactccttagcatcatgattaaaaggcccttgctccccctccctcttccccgctccttccctcctcccttgttctttcttttctgaatattagagaattaagtaatcaataactctgccttatcttatgtcattatattggatatatatctaggcacactgggttgaatacaatgcatcatgccacaattccctacactattctgtgcagtgacacgacagatgagaagcctaggagcaattggctgaaccctggggctgagtgtgtagcaggcagcacagcgcagggctgtgctaacccaccctggtgttcacagagatgaccgtgcgattcacttcacagaaagcatcctcatcgtgcttgactgtactcagagaatggggcctcagtgtagcctgctcctcagccttgcgcaggtatgaatgaagcctgggaaaccctgagatcagggtttagagctgcaaatgattagctgtacaaaccgagatgtcctgggaacgccggggaggccgtgagatcattttccagcttcagccactgaccgtggtggccttagcttcttagggttcataattaccagagcatgtttataatagtttctcttgctttatttatttttaattaatagactcttgggtttcatatttatataaagattggacagacctataaagcatttccatagagccctcagtaccgtgggttgggtcaaatttgggcttttcataattgttcttttaaatgtattttcaatcgtcctaatgtttcttccctacagtgttgaggtaatcaaaattgcctgtctttagatttaactgtctctgtcttcttcactcttccttactctgggggtcaaagctagacacctttgttcctcctctgagggtgtgcatagaagcagggtcagtgaccatccaccatcaagtagggctccactgagacccaggctctcggggtcaccacaactcacttctagccttccgttggggtcccatgctggttatctgttgttcaggatacaacctctgggagcaggtgttctcctcacccatggggctttgtgcagaccatctgtggggctctgggaagccctaacagctctgggctgagttttctgttggaaaagtggcttcacttgccagatcttagccagaacctaattcaacagtgtctccagaaggaaaatacttccgacaccctctgcgttgttctcctgacttccagctcgatggcttgttgacttctctagactgccctgcccagaaacaccgctccccagaaacactgcgccctgctcagtccaatgcatggtctccatcttccgtggaaggctgcgtctttacactcagtttcatctcttcatattttcgttattttttttaaagtttgcttgttcttgtaaaatatacagaatataaagtttaccactttaaagtgtatgagttcatcatgcagccatccccaaccccaagcccaaatcctctttatcttcttgacttatcaaacactaactacttctctctcccagttttggccatgataacagccactttctcttttttctttcaaaatctattttatcttgatgtatgcacacatgcgtgtaaagtggacatgtatatgcctgttggtctggatgcccatggagaccagaaccatgagatttccctggagctgtagtcattggtgattgccagccatgtgccatgaatcttgggaacaccgttcatgtcccccacaagagcatgacctaaccatctctccaacactggtgacagttctttctatgagtctgatgactccaggcatcttataaatagggcaatgctatttttataatcctgtgtctggggtatttcccttaatgtaaagacctccaggattgcctgtgttgcagatggtatcaaaatgtattccttttgaagaccagataactttcatttgtagctatttccaaaatgttgtctgatcagtcatccatggatggacatttgggttgtttccagcttttggctattctgaataatgttgctataaacattggtgaataaataactttttgaatgcatccattctctcccaggcacgtaccatattggaattgttggaccatatggtaattctgtcatgggattgttttttttttttttttttttttttaaaggaacactacactattgttcacagtagctcacggctttatatttctcccattcttttttaaataaccaaaagtatttcatacatcttgagcgctcttcatatgtatacgttatttttgatgagctttaaatgtactgatttttcacatcagtgtctggccatgtggagatgctctgtgaagtaagatgtctcaagaacaaaaggagaatcttcacacaggattcaggggaagaattcacgtccagagtgagatctcactcgcacataaaggagctctctgatcactccagtgcaaacctgttaatgattcagtcagtgaccaaaggaaagaaaacatagcgctccccttcttaggagtggtaaatgtgtaactcccagggcagtgcttgtggagtcgttcagtagggattttcccagctcctgtagacggtgcccccactgggcttctgaggtttaatgggggaccatttgctttggctgttttcatgaccatgtgttgggagagaggtgtggaggaggagagaggccctaaccctttcattgtcactatgtctgccgaggccagcactaagtcaacgtgcagactagggataccatgcaaaggatttgagttttcagcctggattccctgcactgagacaggaggcagagcagaagcaagagtcctcctcatgtagaccggtagtctggagttggaaagctctccgttgccctctggttctttgctattcatgtttagagttttcgggaagctgttgctggtgtctctgctctgctcttttgaccttctcaaagtcgctatcaccctctctcacaaatcccaagcatcagagttcagtcccacgatccttcattgctgctggccctgtcctgttccactttaggattctcagtggtctaagaaaatggccatggcagtcgtggcgcacgcctttaatcccagcgcttgggaggcagaggcaggcggatttctgagtttgaggccagtcaggtctaggacagccagggctacacagagaaaccctatctccaaaaaccaaaaaaaggagaaaaggaaaaggaaaaggaaaaggaaaaggaaaaggaaaaggaaaaggaaaaggaaaaggaaaagggaagggaaggaaaggaaaggaaaggaaaggaaaggaaaggaaaggagaggagaggaaagaagagaaaagaaaagaaaatggccacaggttgcaagacctataaggtaccatcaccttctggtctctctctggctctctagacttgggctgcctagactgcttgcagtgtctgtattccatgctgtggccctgtgtgctgtctactctttgcctctttggcctgttctctagacacttgtcttctcttttctaactcacgtttggatggaacttctcagaccaccacacctctccaaactagatagaactctcctgctgcacccaaatacccttctggcctctctttctccctgcgatgcaggcagcctcgtctacagacagccgacactcattgatgctgcatttacagtatcaaccacactccctctaacgcagcagatacttaatctctgaccgtcaaaggacacttaaacgtgaagctgtccggtgtctcctcttctcagtttcatgtgtcgttgtaggatatttcactgcctacctctccctcttacctgtttgtgctctagggaagacagtactcactgccctggagctccaagtgccctattgaaaggtacaggctcttctcagaacattcagccccaatcacaggtcagagctgtagaggcacccgtgtcccctcaactgtgaggtaggaggggatgacacttcctggataacattcagctgacccacaggctctaattttgcttccctcgccccgaaacactgaagcagacagtatatattgcctcctgttttgataagaacaaaatgggagcttccttatcaaggaaaagcctagcgtactctcgaaggtaaagactagcgtaagtggaacggggcagatctggctgggggtaggactggtacttctgtaccaacgggtctggactggcctgtcactgcatgccataaccaggtacagctcgccctgagggtccctcggctctcttcccgagtgttcaaagagaggaggaagggaaagagtcccacaaagaacatttggtgacaggaaggttccagaacacacaggctaggaatggagagcactcttctttccggttttatcttgttagagaaagtggttcaacatttttgttttgaaataacaaacactgctagtcaccctccagttgggggttggagagtgactctgggaggacgggggagcttcctgctgggctctttgaaacagcctttccagctgacagaaagcaggtcttcctccaacagacatgacagacatctttaaaattccttccccgtcttctgattactgattaaaagcttgactctttattcttcgttgagccctctttactgtctctgagccctcttactggctccagtcttgggcatttatatatctcagcatggatcaaaaatgtatgcttcctggtattctgatatgttctttaaagtattagagtcagaaacctgtgtggtctgagtttatcaccacaagcaaccagcccccttccctctggaaaggcagacagaaaaaaaaaaaaagagtggggagaagccattagactttgacctgctcatctcacgtgttaatatcagtgctgaagtgaaagaaaagcaaatccaaacttctttcctagtttctgcagatatccttaactgtgtgggctggacttcagtggacacacagccaacctccttcatagtagttactcctgggggatttctctagcagcagcgtggcaagcatgcctccccaggaccttaccacgtcctggcttgtggtttcttaaagctttgccaggacatggagtgatggacgagacttctctcagacagttgcttcttcattcttgagtaagatgtaagtttcatcatctgatagtttcagaaacaacaaagcttgctaagtacaaacgtgccccttcctcggggatcatcaagtgatacgatttatgaaacgcactattaactattaacctagatgccttttgtctgtgacaggtttgacttttctttttctttctttttcttttccaatttttttattagatattttcttcatttacatttcaaatgctattccaaaagtcccctataccctcccgacaagtgtgtttaccctgagaatgtcagaaataaatgttccctgttcagtcactgacagaagggtgggtaggtccttccatggggaattcccagaggcttacatgtgtcatcagcccttgtggattccgagagagcccagagaacatcggtggggatgaacatcagaccttggaaacgaggttatccatgctctcagatgtccgagtttcagacaggttggctctgtttaagttaagattgagacccacggcaggactcctgtcccagtgctgtggcaaggcagcgtctgatgtgtgcctacgatattatgtgacattgcatatgtgcattccggcgatcattaacgagtggaaagctgtcatgaagtggacttgaaaatggctggatcagctgctgttctagcaggaccgggatgactcagagtctgacgaaaatgcctccatcaacagtttgtgtgcagccaggcttgtgctgagagaagacagtttagtctcaagcaattttttttaaatgggcagcggaagtctcatgaattttgtttggatgaaggcttaagaatttataagtcaatagaatctctgtttcttcattctaagacctgctcatcaactagaattggtgagtgagggctttgtcagtcagccggggctgctggaacagataccacaggctgggcaacttagaggaacggattcctcactggtctgcggtctaggtcgacgtgtctttggcttgcaggtgcctgtcttcacatggtcttcccctaggtgtgtctgttctaagttcttcatttgtcatgtatacacatgatgtatgtacaggtacatgtgtgtgaatgtacagggtcagaaccttacttgctatttatccagctcagtcatctatgagtatttcaatttgttttgtgcgtgtgagtacatgcacacatctgtacacaatgaggtgaccaaagggtgaccttagatgtctgtcattccctcaggagccaccactttagtttttttcatatgagatctttcattttcctgggctcatagactaggctgggttggctggccaacaagccacaggtttttacgcacctccaacctctccagagcccaaatgacaaggacatgccttggtgcacagcttttaaaatgtgagacctaagaatcagactcagttgctcatacttccaaggccacttgcactctgctgacgggccagtcgtcttagcccacctcactagtctggaattcagtaaactggctaagttagttgctagctagctgccttggagcctggagatctgcctgtctctacatcggcctccccggagtgaggctgtgactacagttcatacctcccagctcatgaactgctgttaatctaagttctggagattgaactccagccattgtgcttgcatggcaagcaccttatggagctatctcctgagtctctcggttcttctcacaggacacggggtcacactgagtcagtcacctcttacttcaaaggccttatctccaaacacactggaatccagaagtaaggggtgagggctgaagactttaacacaggaaatctggggagtgtgtaggtcagctccagccagcttcagtggagaaagtttatacttaggctctttgcagcatccctttcctccttatctgacttagagcagggtccagtttttgtttcttttctggcccacattctggagagcatgagaactatcgaggcaacaatggccaataaacgaaagctgtgtttagcatctacgtagcgtccttttcctttttatcggaattacagcccccattccttgtttcagttcgcttcccggtctctggtttggggaccttgaggacgattgggagattgggagaacatcggcctgcttcccaatagaagggttcttattcatctgcgagtgagcagggcctgcctgcaggcctagtctttccctcctcagtcgtccttatctttggccttgaatcccacacacagctcagctgtctgtataaacgctggccaaggccttggtaaggcatgaaaatttggtattgttgtaaatgctgctagctggtgggaagaatgggaaagactggggtagaacttggtgcttgtgagatttcccaagaaggttgcaaatcctttctgtgcgctcatttgctcgctgaagtacaggaaacagccgttcttagcatccttggaatgcaactgtgagcttctacatgctcattctactaactcggtgtccttgtaattaacttgatcgctcaagttaacattgattagttgcttttgcctgtccccacccccaaatcctttcccctgctgatctcacgctgccatgatgcagatggacccagagcaatggctgctctgcatcttgagatacgaagctggtttctgtgcaaatgcaaaggttccttgttgctgttgctcttgctgctgcttttaccgcagaaggagaactcaccacttaggggtcggggcttgctccctgaaggctgtgtgagccctaggtgaggacttagtgagaagggtgcttggattcatgctgcaacgtgcaatgatagtttccaaatatgtaaaccaatcctaggatcgttcaggattacatgaggtgatcgtggagcgttctcaacaggcttgtggtgacctggtcggtcaccttattttcagtgtgaaactgggaaagggcaaattcatttcattttgatgtcattgtcactgtctgatcatcattgttacctggtacctctatttgcaaagtctgagtacgcaagtgcacatgagaagttgtcattggcccacacgttcattcccgtggtgaataagaatccaagaatagctacacagtgctcagtgatgcgcaaacaggggaacgtgctcctccatcttcatgtatcaacccagcttgcttctgatgttcttgagctgctgtgactgccttaccttagagggggacacaccacaggagcacagagtgccagtgtcaggtatccgtggcatccacaggctaacctctgccagggaacactgtgtgtgggtgaacagttgtcggtaataaggagacagtgctatcattccccaggttccttaaaaacagtaaggtacacagcggttacgggatgggctcttgtgcctagaagttagtgagcggtaggtaggaaaagctaaaacaaacagaaaccaggaacttcagagatggtaactgtatgccctgtgtgtacacaggcatgcacaaacatatgcttggatagctgcaaacacacaaaggtttttatgtacacgtttacatgtatgtattatgtatgtagtagtctgatatcctaagaacattactccaaagcctcaaacaagacccaggtccacagatgttgtttcaccagttactgttgctatgacaaagtgcctgatggaaacaagttctggctcccaggtatacacacacacacacacacacacacacacacatgcacaaacatgagtgcacaagtgtatacactcatgtacatacacacatacacacatgcacatatacacgtgcacaaacatggacacatgcatacatatctacatgcacacatgtgcacaaacatgagtgcacaagtgtacacactcatgtgcataaacacatacacacatgcacatatacatgtgcacaaacatggacacatgcatgcatatctacatgcacacatgtgcacaaacatgagtgcataagtgcacacactcctgtgcgcacacacacatactcacaggcacaagcttctttgcacacacacatacacacactcatgtgcacacatatatacacacatgcatacatgcatgtgcacaaacatgggcacatgcatgcatatatacaggcacacacgtgcacaaacacgagtacacacgttcatgcacacacatggacatgtgtgtatgcacgtacagacacacaaagatttgggtctctagaagtgaagttagagaatcacataacagtgcaatctagcgtcttctcattaactctagcacagaattcgtggcagattttgaatcaccaggaaaacaggcattttcggaatgtgtctggaaatgctctgggtggtgctgggctgtgggagagatgctgcctccttagtgctggtctggggctggaggtcaaaagtcctgtttaaagctgagcttcgtttaactctttccttcacacttcactctctgtcctcctgtcttcgtcttccccagctgacatcatttttgtttaattaataacttttgtagtttacagctcacagtgatgtgagtggagacttcctgttcttcatcctatcagagttcctcctcttgtcaacatcttgagtcagtgtggggcattggtacaatcctgtgttcatccactcgtgttttattaaccaagcctatagttgtgcatgttctgcatattttaatcactgtatgatgacttatgtccaccattatggccactataaggtcatttcatctcccatgcttccttatgtttacccctcccccaagtcccttacagcttctggttgttttgtttttttaatactttttttagttttaccttttccagaaagccattgagtgagaaccccgtagcatgctgcctcatcagcgtgccctctttcagttagcaggtgtgcgtgcaagtccccttcctgtctttttgcagctgtataattcttttcttgtcttaccactgattggcatgtttgtgcgtcatttcacttatgggaagcactttttattgcttccaagttaagatggttataaacaaagttgttgcaatcatctctgtgcagattttcatccagttcctaatatctaaacagtgtggtcattggttcatacagagagtatttacagttgtgtgtgaaactgtggtgctggcttctcatgtgttcttgctgctcccaatctttgccagcctttagtattgtctggtttggattttcgccattctagtaagctgtgaggagctctcctcaatgttatctcagatttgctgtgtgaaaaatatttaacatctccattaaggcaaagtaacactgcaatagtcagctccaaacagaggaagacattggaaacagtggagccatcccacagcaatgctaacggtgttagagagaagaattaagtatgggctttgtcgcggtttattttgaaaacagtcccaccgggagcataggtccctggttgtcaggtgtgaacagtcgtactcaaaagcatagaaaggccctggcaatcgtcactctgggcttcgagtatttgcttctgactctgttttaaaattgcatatatttaatgtgtagagcatgggatttgttgtacatgtgcaccatgatgcaaccattgtgtatctgtaagtccagagtttgctgtctttgtgtgtgtggtcagagcacggaaggttttctgtttagtaaatttagggtacaggactgttaccatggaaacgctgttatacactggaccagcaccttgtccagcctgtgcatctgaagttttatacccaacgttcatcccccatcctctctccaggccatgggaaccggagttctacactccatgtctatgaatcgggatcttttacgcacaagcgacttcttgcagcatctgtcgtttggggtttgacttattaattctggattgagacctcctcggtttcaggtctttcaagttgcatacatcatcattaaagctgccaatgcccctcggcctggaaactggattttggagcgctccgtggatggcgtcaagttcaaaccctggcagtactatgccgtcagcgatacagagtgtttgacccgctacaaaataactccacggcggggacctcccacttacagagcagacaacgaagtcatctgcacctcgtattattcaaagctggtgccacttgaacatggagaggtacggtctgcatcgcagaaatggctttctgtcatctgaccccccacccacccaactcaaatgtcgccatgatatctctcataggaatctatgctgaacattcaaaaccaatgagccttaaccagaggtgtgcatgggctgcctcactgtttaaagtagccttgacaggtctcagtcttgatttcttctcagcccacggttttctcaatcttcactctgctgtcctctacccctttagaatctttctataagaccagggcaagagcatgtgtttattggagagaagtcaggcatggtgacacattaagtgtcattctagcactccggaggctgaggcaggaggatcatgagttggagggatacatagctttgttctttactcaaacagggacagaggaggattagagggcaaaggtgcttctgaaaggtgtcgtccctcctccttctccctcctgttcagagatgtggagctgggtggagctgcccagggactgtgctcaatgtattcacctcaggaacctctgaggaaacagaaacagtgcggtcatccagcgccttgcttgatgggtgacccctgtgaaaactctcaggtgctctccatgatgggagctgggcaggaagatcttcagttacagaggttaactaagacagcagacatccttaagtttggggtgtgttttccttaccctccctagcctgtccatggcattgggcatttgcttcttagaagctatcgcatactagacccccacaacacgaggagactcatgctactggaagagttccagaaatctctgatgtagaaggatgggtaacccccaaaccgaggcaaagctagggctactgtttatgagtacctaacatgtgttagatgaggtttttgtttgcttgcttttagattgatctttgtaatgattctgtcacaggactttattgtacatgtgtacatgttaacttgtccatacaactgacatgtatgtttgcctgtatccagattcacacatcactcatcaatggcagacccagcgctgacgacccctcaccccagttgctggaattcacctcagcacggtacattcgccttcgtctgcagcgcatcagaacactcaacgcagacctcatgacccttagccatcgggacctcagagaccttgaccccattgtcacaagacgtgtgagtatggatggggtccctggccactgtgacaaccttggtttcagggcacattcttttcttcattttctttggttggcttcttgtcttcccagctatccatattttactgatgagtatctcctgtcatttgttataaagctagtttggaggtgatggccccagcacgcactcctcaggcctcctggctccctcctagttgtctccatcgtgtagtcacctggagaatgtaatggcctttgtcctaaatatcctagcctggctccacatctgaacttcagcaactcaggcattttaatttgtttgtttgtttgtttgtttgttttgaaatgataaaatttgagaaatatgtaagaaagtgtttacatgttaagtgtcaagttaagtataaaatggacaaacactgtatgccactcccatcacttcagagcgagttaccaggttgtgggtagctgggtgtgtaaatctgctaaactttttcgaagcagatgccatattttagccagaccagcaatgtggggtccctgagcctatcacatacacttacaaacatctggtggtgtcaggcaggcactgtgggctgctgggcgccatgccatggcttaccctgtctcatcctgggtcaccctggtggtgttcatttgtatatctctggccatccaggttgagcctctcagaactcacaataggtttttttcttttttctttttttggtccatttttgtgtattttgtattgaaatcaggttagagaaatcctctcagtgaggttttatgttcacgttgaagccatgaagaactctattctgatgaacagagtttccgttttgggtgaaatccatgttaccttcttttgtcattggtactgctgtattattgacactcactgtggcctctcaaaaatgacttgcgttttgctaggtttccaacgatgttatcttaacttctcttctagcagcgttgtggtcctacctcctgctctggccatccacattaacctttgtgtttggtatgagggtctcctttctatacacatgtgatgctgtagagccaagtgtcagaagtggttgactttcttccacaatgcgtccctatgttctgatgctgctgttgggcactgctgggctttactctcccgagtctctttctggaggaactgtcctgttgctgcattgatctaaccccatcccacggatgcattggtctaactttagacaataacaagcatttgatttctgcagctttatgttaaatatcatggtcgggtactatgttggtccagattggcttttgtagattactggcattgtattttaaatctttatttttgtgtacttttgtgtttctatgtaaacttattctacatgtatctaagcccccagagactagctgaggtttcaggaaattatgggttgccagcatgggcactgggagctgaactctggtccactggaagaaaaggaagtactcttaagcccgtctctagtaccctttatattttctttattagaaaatattagaattagttaatttctacccaaaaataaaaacacttgctaagattttcactaggattccattcttgggctggcgcaatggctcagcaggtaagagcactgacttctcttccaaagatcctgagttcaaatcccagcaaccatatggtggctcacaaacacccatcatgaaatctgacacccacttctggtgcatctgaagacagctacagtgtacagtgtattattatatataataataaataaatctttgggcaggagcgagcaaggactgagcgagcaggctgaccagaacgaacagaggtcctaaaatctcgattcccaactaccacatgaaggcttaccagcatctgtatagctatagtatactcacaaacataacataaataaataaatctataaaaataaattataagaatattccattctttagatcagtacaggaagaaatttggaagatatttaaacaatattgaatcatccagtcatggtctcaatggtgctctctgcattaagtccactggccaatattctttattagtaaaggtgttattcaaagatgtaagaagaaatcaaaggcatgcagcatgtgtttgtaggagtgactctccatcatttgtagctggcacagacatgtgcacagataccctttaaaaaaaaacaaaacaaaacagaaacaaccactagaaacaatgactaagtcagcaatggagtaaggccaaatcagtcaatcaaattaagcacatttctatataatagcaatgagcaataaaaaagaaaatcaaaataaaaacctattaacatggaaagcatgaagctgtgatacaaagtgattgaagaaaaaaaatgactttcttctactcatgtgcctggcatgtgcacttggcagagtgtacacccaagaatctacatctagatgatgacattccttcctgaacacatcctgggcaccttgccctaaccctaaccctaaccctaaccctaaccctaaccctaaccctaaccctaaccctatccctaaccctaaccctaaccctatccctatccctatccctatccctatccctaaccctaaccctaaccctaaccctaaccctaaccctaaccctaaccctaaccctatccctaaccctatccctaaccctatccctaaccctaaccctatccctaaacctatccctaaccctaaccctatccctgaccctgaccctgtccctgtccctgtccctgtccctgtccctgtccctgtccctgcccctgtccctgtccctgcccctgtccctaaccctctaaccttaaaggttaactccctcaaaatggagcagggtcaataatgaagagggatgtttggcttacaacaaaaccataatgaagaattcctttagaccctcaggtcctcttgctaagctaatctgagcattatctctttgaactgaacacccagggtcttttgtgtgtgaaataaaaatgtaaatgtgagcttccttaagtttagagtaccaaaagtcactcccaagcccaggcgagatatttgtgcgtctccactacttacttggcgccaaaatgaaggtttttttttttttttaacttctgtttgttacactctttttccccccagtattactattcgataaaagacatttccgttggaggcatgtgcatttgctacggccatgccagcagctgcccgtgggatgaagaagcaaaggttcgttctagcgttctatacttactgcaacctccacacagaaggtttagccgcctcatcctccattcttgaccgaaggcagacagttaagaggcatcacgtcaatttttaaaaatttaattaacgtaactggttttggttttagcaatggcatccacttgctttggttggagggctaatttctcataagcccttactgtgttatttagtttactgtgttagtaagatatctatgacaggaaattgacacgatcttccacattcttataagagaattgggcatgtgctgatataagttatatgtactatgtttatgattctctgcttttcagtactgtggggtactaaataaaggaaaaaatagacttgtttgggtgtaatactaagtaaataatttgaaaagagttggacagaaaagttatttacttccagtctttggagttctgtgtccccgttaagtagcaatattctcttttatttattttacttattgttaattctagttgtttaatctttacaccccttggggcttaactcaggcaagcactctaccagtgagacacaccctcagcccacattctatattaaaattattttaacatttatttatttagttggaggggtacatatgtagagtgcatatagtgcacatgtagagatcagaaagaaactcatgaaccccaactttcttattctatcatgtgactctctggggggttgtcaggcctgatggccagggagatggctgagccattcttgtttgcctgcttttctgggtttttttgtttgtttttttgtttgatgctgaaaaccatattgaaaaacatcagagaatcatcatccaaactacactaaaatcttttcataaaatattgataacgactcccaacccctaaagtcaatgcctctttttaaagaacactcttgttatttaacacgcatttgtttgtaatcgggctatgtgtgccatctcctccagaagtgcaacaccaataacttgatatcacgatgacatgagacagtcccagatccctcaccataaagagctaccatatactgacttcaagtggttgctttgtttttttttttccttaagtaaaattaagaataagacacaggtaacgttttgagctcttgtcccacatccttgttttgtccagcaactacagtgtcagtgtgaacacaatacgtgtggcgagagctgcgacaggtgctgtcctggctaccatcagcagccctggaggcccggaaccatttcctccggcaacgagtgtgagggtaagtatacttacaacctggagatcgaaggctccagctacgtggttggttaaactcatggcgtcttggttgtaatgaacattacatacttactttttcagcatttcaactactgcctgaagccaagcacgcctctgtgacatttaagggctgaggggtcgttgtagattcactattttacctaagtttcttagcccgtgcatttctttattagctacaaatctgaagtcgagatgaatgaattacttgattacggtactgggtattgaacctataggcgtctaccatgctgagaaatgttctaccactgaagtacatctctagctatcttggccagtgatgtggctcagcagggaaaggcacttgccaccaaacccaatgacctgagttgccactctgggatccacataatgggagggaggactcagctcccataagttgtcctttgatgtccacatgcagctatggcctgcatataccaaccaacaaacacacacacacaaacacacacacacacaccacacacacactttaataaaaatatgtttaaattaagattttcactttgtctctctccttcccacatttttttctgagcgtttgttatatacagactatatagtttgttaatacagactatattattcaaattattgtatatgtttatttgaatatattagtaaaataaaattgatagatatttcaaatacattatttgacataaatatttcacataaaattgaaatagaatttaaaattgaatgtatttgtaatgtttcctatgtgggaaatagcataataatgtataccattctgcagaattgctttttagaagtcagtaattttttaaatttagctttcccgcgtgtctctgcatgttttgcctgcttacatgtctgtacgttacttgcatacctaagaacattaataatctaagaacattagattccccagaactggaattacacatggttgtgcgcctccatgtggctgctgggaattgaaccctgattctctagaagagcagccagtgcttttaccttttaagccatctctccagcccatggaattgcttttaattttagacccaggtctcacatttattcaacaagcactcaacctctgatccacactccaagcctcccatatcattttttgagggggacacagggtctccttatatggcggtgtaaatgagggtcagactctctgtcatgcttcagcctataaactctgaaatagcacgtgtacacggacacacccacccagtacttttagttattttggtggcaattcccatttcctcctctattatctatatctgtttagaaagtatttatttatttaatgtctattggtgttttacttacatgtagcctatgcctggtatccatggaggccagaaaagggcatcagatcccctgggaccagggttaaggatggctgtgagccattatgtgggtgctggaagcagaaccctggacccatggaagaacagccatcttaaccacggagccatctctctagctcttgcctatatcttacagaattatttctgttagaattttaaaacacagatacttcatgaaataagggttttctttaacagggacacatcccatgcattaattgagatattaaaatatttcctagaatgcaactgtcacaacaaagccaaagattgttactatgacagcagtgttgcaaaggagaggagaagcctgaacactgccgggcagtacagtggaggaggggtttgtgtcaactgctcgcagaataccacagggatcaactgtgaaacctgtatcgaccagtattacagacctcacaaggtaagtgtctgcttcttgccactgcctagctcctctgccttctaggtggaagacatgcctcattaactctcagcctctgtctgaaggatagcttccttcctttatataccatggactggtggtcttcagatttttttctcctacagaggcttgctgtcttgcttaaagtgggaataggcggctattgttattcaatttgaattggggtcctgtgaggtgtgtaattgaagataattctaactataaatgtgcagattcagctaataactaaagggggccataccttagccactggatgcagtcatccagcccccaattgacttgatgagcccttggaattggcttgctcagtggccatgttcaaggatgacagtaataggtgacagagagaaggggaaccgtgaaaagaagaaagggtgacatgttgctgtcaccatcaaaaagatgtttagagcttcttgcctggggccattttatcttcctgacatctacatcccattacacagagttgctgtgatagtctcaccctgaacaggacactgatccctcatggttgacactgcggttattatttcaaacaatgcagatatttctggtgtcatccaggacaacttctgtcttgcaggtatctccttatgatgaccacccttgccgtccctgtaactgtgaccctgtggggtctctgagttctgtctgtatcaaggatgaccgccatgccgatttagccaatggtaaggacttggtctgctgtgtgtgcagttggtccagggtgtactgtttgtgctgggtagacttattactgggatgtagaaatgtgaggatttgatcctgtgtcgagtctatttattatcttctacatatattgagccctgtagtgtgtggggcttctgtgcatcccttcattctcttactctggctttaggagggtcatgctgttgtgtgggtatcccagttagttctatgactctgtaatatgtgtttagctatatcacattttacatatccgagtgtgtatcaattgctgggtggatatataaaaccgggtatttctattcaccaagggaatctaaaacattgactgcagctgtggtgtgctcacccacacacatttagtggataagccttccagctgttatgaataacactgctatgagcattcatatacatctaattttgtgagtgtatattgtatttactctgggatcaggagtggagctgcagtaacacatggcggcactgcctgtgggctttaatctcattgtctctcttcatatcagcgctacagcaaactgtggcccatgggccaaataggcacactgctgtttaaactgtgcacatttgcctatgtatagaccatggctatgtgagagcagttaagagtgactgtctacttagctttacctgaaatcttgctcaaagaggttgcagttgtcccgcgttggccctctacagaaagtttacaggacccctgctttaaaccctagaacttcacatgttaatcagtactgatgtttctcccccaggaaagtggccaggtcagtgtccatgtaggaaaggttatgctggagataaatgtgaccgctgccagtttggctaccggggtttcccaaattgcatcccctgtgactgcaggactgtcggcagcctgaatgaggatccatgcatagagccgtgtctttgtaaggtaagtgtggaaattaaggaagcttttttctttttttctttttgttttcgagacagggtttctctgtgtagccctggctgtcctggaactcactctgtagaccaggctggcctcgaactcagaaatccacctgcctctgcctcccaagtggtggctttgagtctcttctggggttctctgctcccctgggacagatgatcgagtactgtgaagagcaggaaggcttaagttagaaacagcatgtcccagcaagatggccctattctgtgcccttggattgagattggacaccaggcttactcttttgcggcacctctggctaatgaccatggattcccgaggtgtttctgtggcttcttagacggaacccaatactgctgtgccattttcttggcattgcctcccagttccgtgtttggaggcgcaccaggtacatactgagtttcccagaactctaatgaaatgcagatctgttatcttgcatttctcttgaaagagaattgtataatcacaggaatgcgcacacacgcagtgcccgagaagggtcttatttggccatatgatattaataaccatttccctggaattcttgagatttcctgtttgtacctcctgcctcattcccataaaagcagggtcctgtgcctgggttacatgtgacccagaataagctcaagcatttataagtaaaacaaatagttatacagccctctttaaatagggaaatgttagcacaagcagggcctgttgtgcatgcctatatttctagtgctgacggggctcctggaggggtttgagaagtggagatgaaccatttagcctgggctgcacagtaagatcctgtctcaaaaggaaaaaataaataaataaaacaaaacaagtttatttcaatgtattgaccaatctctaacgtcttaggcttgttctcggtgacagaatcaggcaagttgtcacaggctctctactcataaatactcacggcctgaggtttcccacgttctttgactatttatctgagtatttattacctgtttgtgtagatgctccttaccaagaccacatgcgtgtcatttctttctgtctgtctggatatacaccagcctcaccagctaatcttttttttttttttttacagaaaaatgttgagggtaagaactgtgatcgctgcaagccaggattctacaacttgaaggaacgaaaccccgagggctgctccgagtgcttctgcttcggtgtctctggtgtctgtgacagcctcacgtggtccattagtcaggtgggagaccccgcaactgccttaaccagcaggtcacggggccatgctaggaagccaggaggccaggtcttccgtcggagagactaaggcatccatgcaaggcagcccactcctaaagcattgctatgtgtttgtactaatgcacgtgctcattgccacatatgttttccaattgagacagttggctggaaaggtgctgcaggatatataacctgttgtcctttcttctgtaggaaacacttccccatgggagtttctcagtttggagtgggaggcatcctaggggtagaagaagagcaagagtagagggcgtggaattctagagcaggcaggctctggggtgtggggagggctggcgctgtgagtctggagggtttacagggtgatggctggaagttagagaggggcgtctgggctccgggcttaccactactgaccactagagtcacctcactaggaggctatcctcacccctgggcaagagagacattgcagtatagattctgaggttttaaaatattttttttatcatttgactatgaagcagagtgaagaaagaaaagatggtcagaagcaggaaaatattttaatcatgatacttatagtctgatcaccttatagctaagatactgggagcagaagaattttggattttcttttttggaatatatatatatatatataaatgttatatattatattttatacacattattatatattatatgttatattatatattatatatttcaatataatatattatacatattttatagatattatatatgtttctaatttgtatatataatatacaatatataatataatagatgataaatatataacattggaatatataataacccaatatactatatatgaatatattatataacatttatatatataaacattaatgtatattataaacacgtatgataaacatatataaacaaatattgaacatatattatatatctctatctctatatacatatacatattcgtgcctatatacatcttgcccacatagcctgaatacagtttttgtgtactgtttcgggtgtacctgttttatgactcaaatgatgtcaggtgtgaagattcccatataatgactccaataactctgggtttggggactttttagatttggaatattaatcctattagtatctttgctcttattaaaaatctaaaatgtgatgttgggtggagtgagaattttgtatatatcagaaacaggaatgtgctttcattttaatcgcaggtgtggggtgtggggctgcttcagactctctgcagcagctgactaggacttgcctcatgctttagcaggagtgctatttttccagctgtggatagtttccgcaatttcctgatgtttggaattctggggactttatttagagtttatattaaattccagggccccaagaggtgaggagctgttggttgctatgtaagtagtcatgggcaaaaaggaaatatcgagaagaaagcagacatcctaacggcaaagatcaaagttgccccaaggaactggctggcaccttcagtcagcaggaagtagtctaaggataacgtcaccgccttcccctctgcccctttctctctcctatccagtgttagggttgaaagggtagaagaagaagggtggaaaagggtggaagaaagaaaaacccgcaaacaaaagaagaccagttagagccaggtgtggtggccacgcctttaatcccagcacttggaggtagaggcaggaggatctttgtaagttggaggccagcctgatctacatagtgagttccaggctagacagagcaacatagtaagaccctgtctcaaaaaacaaaacctaaactatataaccctgatcttcgtggttgtgcttcttcggttgtgtgtaactgtgtgggttgaggtgtgtgtgacatgcacttagccttcctcgatcctagcaggaagcccttcactgtgttcgggtggccacagccctgctagctctctcttgagcgccaaatgtcagggcaaagacatttacacaggacttgatgcactctaaggtgaccctgatgccatgttctaaacttctcttcttcttctttttcttcttctccttctccttctccttctcctcctcctcctcctcctcctcctcctcctcctcctcctcctcctcctcctccttctcctcctcctccttcttcttctccttctcctcctcctcctcctcctccttctcctcctcctccttcttcttctccttctcctccttcttttcttctcctcctccttcttcttcctcttcctcttcctcttcttcttctaggtgaccaatatgtcagggtggctggtcactgacttgatgagcacaaataagatccggtcccagcaagatgtcctgggtgggcaccgtcagatcagcatcaacaacacggcggtcatgcagaggctgacttccacttactactgggcagctcctgaggcctacctcggaaacaaggtgtgtgtggtgtgggatgcccagctataaatctcagaaagtattaagaatttaaagcatacttactgagtttgctcatgcttgcagccagcatcatgcacacatagtctgcactagatctctctaatcctcttggatttttacattacagcatcccaccatcctctgctctgctgcatccagttcctaaacactgtcttgtgactcttattcccttcactgtgactgatttaccctttgttcctctgggtccctgagtggcttcagaccttctatggggcgttgctgcattgccactttgcgtagttcacaggagactctgcgcatggcccaacagagaatgcccagggagatgctcctgcagtggagtgtctgctcagctcctgttaacacatcaatacaaatgctgctcacgtgcgggttacagacgtgcagaataacgcccatttcatttaaggaaaatgaaagacaacaatctacatggttcattgtccagagagctgattgaagcttcttgtcattggtgtttgatttcccctagccagttaattatgcctggcctctccagattctgaccaactagtaaatacagccaagggcatccatttaaataactttatggtttggtttaaggtgatgctgtaccttcataataaactaaacttctagttatttttattgctatgttttctaatttgtgtgtatatacacacacacacacacacacacacacatatatatatacatatgtatatggtgtatgaatatatatatagaactatctgtctgtctgcttggaggacaggctcttgatgtgtatccctgtctggccttgcatttacacaccggccccagactccggagtaccggaagtataactgtgtgctttcacaggatgcctaacttgtatattataatacatgacatgctctgtttataggatatgatcaccagagagctttaaaaaatattcttgagatttcatgattgtaccattgcagtctgaattttgtgatgtattcctcatgaaaaaaaaaaaaactctccagtatacattagtgaccctccagtatatgttagtggacacccccaatatacattagttaccccagtaactaattccttgtatatgttaatgggcatctctcgtaaacatttaaaggaaaaaaatattttgagagcttcctttcagtgacatgtctaacaagattggcaatagtgaaaaggttcatttaagtaaaataaaatgcggctgccaagaggggtcaggaggaaaaggtgcttgctgccgagtctgagctgggttcactgcctaggacccacgtcataaaaggagagggccatcatcttccacaagctgccctcagactgccacacctatgccatggtgtgcgtgcccatacacaaatacatgcaataaaacccttttcaattaattaattaattaatttaatttgcatttggatgtttaccttggagacttgtagaagaattatatatctttctccaagtgtcaaagatttctttatcataaccatatctattaaatagtatctaatatgccttgaagtgtgaatttctttcatatggtcatcaggatggctcctgcctgtggatctcagcaatggtttcccctgacttaaggctatcactgttgtctcctgtccctcaccctcaccttactcttccagctgacagcatttggcggtttcctgaaatacactgtgtcttacgacattccagtggagacggtggacagtgacctcatgtctcatgctgacatcatcatcaaggtgactaatttgatttgatgtagagattggggtctggtggggtggcacacacatgaacacatacaacacatactcctctgtgtgtgtgtatgtgtgtgtaccatatatatgcacaactgcacatgcatatagggaaataaagagttcagtcaactgccacctcctggtaactctggattgggtcatatacttcgttgcatgtttgctctaagagcttgggtgatgggtacggaacttaattacggggcattaaattgaattacaagtgtctttcctctccattttatatgataggggaatgggctcaccataagcacaagagctgagggcctgtccttgcaaccctatgaggaatacttcaacgtggttagacttgtgcctgagaacttccgggactttgataccagaagggagattgaccgtgaccagctgatgactgtcctggccaatgtgacacatctcttgatcagagccaattataattctgctaaaatggcgctctataggtatgtactggaaggaatctttttacagagagtacaattttgtctttagtgttacttacttcaaggttactgttcaaacaagggatacagttatgggagctgggcgtattgcaattgctttcacacatgtaatgttgctgaaaacatgaggcacaagggcaagtacgtctggtcaggaagagatgactttaggttcagaaagcttcaagtgcagaaagcatcaagcttccaagcaatgcttagagttagcagcatctgaacctcactgcctccttgcccttcttcttgctgcctctcttgcatcattcctctgatgctaatggccttggtttggcacagttatttgggctactgagtccaacgctggccatttcactgccttgagggggttagtgtatggaagccaagtgtaaaattggatgcctctaaagtcagcctcgtccaacccgagaaaggatggtctccgtattcatgatggggcagctgatcatgaagaagtgctttttcatttcagtccaagtagactctgtcagagctttccctcagcagcctatgggcagtagtacttcttgtcaacaactgttggaacattccccagagaataatgatggctaccagggtgcttggtgaggactctctagctacacacagacaccacatgcccgtttcctttaaatacaccatgtaggagcctatcttcagtgaaccatgaggtcttttgcaagcatgagagctatgtaatgactcttttctgtttgcaggctggattctgtctctctggacatagcaagccctaatgctatagacttggcagtggctgctgatgtggaacactgtgaatgtccccaaggctacacggggacctcctgtgaggtactgctggtctctccttttctctgacttcctagaggaaaagtctgctgaagtcattgtaatggacaacatctgcatttaactttagaaaactcccaccatatttagactgtattgagttatgagagtactggacatcatgttttaaagagtgcaccttgctcttgcgaaggacctgagttcaattccagcatccacatcaggcagtttataagtgcttataactccagctccagaagcacacgacacctctgcatcatacacacaaaacatacatcgcacacaccagtgcacgcgcgcacacacacacactcacatacataccacagaccatacatatcaacatcacaccacatatatcacacacaccacatacacaccaagcaccacacacaccatatacacacattacacaccacacaccacacatacaacacagatactgtctctcccaaagattagggaattttaagtcagtaagattccataatgtaaccttacagctaggatgtgatcatattaacatttgggtctcactagcaaggttaaccactatgtatacagccaggcctctcacatggtcatggttcatggtcattatgaacatttatgattgattgtgatttctttccaaaaatcattttacaaggagacaatttagtcatttttaaatcagtctttaaaatcataaatggtgtagttaacaaagaaggcctaataacttatgaagtagatatttaagtactcatattttaaatatttttgcaaggtttttgtttcttttatatttggaacaaatgaacattttttttaggtataaagcatgaaaattttaggccaacctaatacattctaggtccaggcactccatgtgtaatgcttagtagatacatgatgctagaccacagaataagagactacaggtgtgacacaggggaaccctgcattagaggcggagccagcaatgccaggagagatgactgctcctagactcattccaaattcactgggctttgcaggcagtagtggtactatgcacaggctcatgcagacatgagagatgtaacccagctgtgccccagtagccctgagaaaccaatcccagggaccacggagagtatcctaacctgcctactgcatatagggtttaaggggcagactatgtccatatagcccagggatgtcatttttgtatactttatctcttctctaaattactaatgagaccgcgaccaatggaaatgcccacaatggaaatgccaagaaaagggttcttaaagaatattgctcaaggaatggtgaccaggaagaagttatctgaagcatattccataatcatattcattcactgttgtttgagtctgtgactacggtccctgagggcgagtcagccaccgcatgctttgttcagttttttttctattaagagaggagttctaccgacatcaggctgatgcttgcaggaatggatttctgtgcagcactttaagctgcttgcctgtgggctgacactcactaagtatgaggtagtatccagttggatgtaggcattaggggacttccatgaagtctatgtgaatggctgtatttattatctgtatacttttaaaaattcttgcttgggcttggttacacagacctttaatatgaggtacttaggaggctgagacagaagtattataaattcaggatttatatgggaaagttatcaagactcttgcctcaaaataagaactagaagaggcatggaatatagctcagtggtagagcacatgcacgtgcacagccatacattcaaacatgagtatgtacttacatatgtatgtaaatacatacatacacatacatacatacatacatacatacatgtggtacatatatgtacatatatgattaaaaacctcctgtctaagcatacctattttgaaagacagaaaatccaagcctccctgcttacacattcctgtgggtgactactgctggctttgacaaggtcaagcccttggcagttcgatgagatagggtcttggagctggacacagctgcctttgagttatccagaggacacaccaggtacttcttcacttcctgcatttgctagttacaaagcagaagtgctgttctcagggatgccttgagagctaaatgcaccactgtgcagagagggaacagttctttgcccccttgtagcaggagcagaacgtgcccttggctgcccacatagcctttccagcatcagccaatagaaggtgcacctgaatgcccacatggcctctctggcttcatcctacaaaggtgcacctgatctctttgctcggataaaccgacccactgtaacccacgcctgtccttgaacatgctcactgtttgaaggcaacctttaatgatttgcacgcaatgggagaaaattaggagaaacaaaatctgccaatgaagtagttatcaacccgtgagttgggacccctttcagtgtgagaactgtctcatccactgaatacattaaaaagatactaaagaaatgcatgctagatgaactcgctgcatggaggtaagtttcctgaaaagcaccggattgcacacttaaagagggtgtgtttttaaggcatggaaatgctatcaggattaaaatgtttgaaagtcagaaaaagagaaatgttttcctgcttacggaacactcaacggctcctgtccaagtgcccgggaaggaagatgcgtccgtgacacccagagtcacaccttgcctgctacattccccaggccacataggagagctttgactacacgctggccctcttttcttgcaggcctgcctccctggctattatcgagtagacgggatactctttggaggaatctgtcagccctgcgagtgccacgggcatgcatccgagtgtgacattcatggaatttgctctgtgagtttattgctgaccttgtgtgtccctaacctgctccttgccatgtgttgtgggcagtggctccctacctcagctctgtagagtcaccagttcttctgtgtcttcagatatcacctgcttttttaaaaaaacaaaacaaaacaaaacaaaaaaatgcttcatacattgttttatgagaggagttgaacatctttgatctgaaaacccaaattctgggactgttgacctgtgagtttccatcacaaatgagaaattccacacccatttttttttttcagaagacttgcattttaaagttgctgaatgtcttccctttcaggctatgtgtataaggcatacccaaaacataaattaatgtcacttctagacataggtcttatccttaagataccactaatatatatcatatataaatgtgtaagttagatggaaattataatatatgcaaatgtaaacacatatatgccaaaagtagaactttaaaaatttttaaatctaaatccaaatagaataataaaacatgataaaaatcacatggtaccatatttaaatttatagttagttcagctaaactgtacaaacaagagcccccttaatgggccgtgctagttggagcagggcttagtaaaggcacaattcaccttgggcacatgataatacttacctggtttcaaccaggtgttccttttgcctttaaggaacagaaaccctctgggtcgcatggattcactgctcaggaacagtgtgactgtgaatactaatagttctattatctggacaaggaagccccagccccgtgctctttaataaaaagatagattgagtcacacaactaaggaaaacctatcaggccccagagaagcatgaagcctggtatcccgggtgcatgctttcttattgttcattgaggggaccttcatttgttctgttttcctctttgttctggatggtttgtacccatggcaactttgggaagtgacatctgatagccactcagtccctctgggatggcttcccttcaaagcctggggggaggctgttgctctatctaccctcatcctgtcttgtggtctgcaagcccccactccatcccatcctaccccaccccaggcctcctgccaacatttgagggtgaccagcatgttgcagatacacttctagtgggtagtatagatgcaggaagtattaaatgtgtattaaataaagattccttgtgcttctataaacatagaggtgcagaagtatatatgaaataagttacatgtgcgttgactgtgctcacctaccaagtgcagaggatactgaagaaacaggtgctaagtgtgctgtgcatatttataatatgcaatattatgaattatatataccttgtatgtactttgtatatactttgtatacaagttctagacactttttagaaattgttttagagttagagggaaattacagcacactctagagtcccttggggaacttggccagcatcccacagttaagatctcatgtaactgacatccatgctggtaccataccactcactaagccacgagctctcatcccattagcttccacgcctgtccactgtcttttttactattaaaaccataagtcctctggcttagcaaagctctgtgtccctcagttcctctcttctatggtagctcatgctttctggtacttattctccaaggatcccaggccttctgcctaacactttcagctacaaattgcctcctacaatcctcccctgtgatttcactgggaccaggcactggaacatgaggccatggaaatgatacattttctcagagcctccaggggatcatgacatcactgcatctgcttctgggaatgccaccctgagccactcagataagatggtgtctgctagccttttctaccaagtgtctatccccccccctttaaacaaataatgtttacttttaggggggatgcgtagaaataaagataacatagatgagagttgaaaaagaaaaagcacacaaaaacttgcttaagagcagggttgtggctctgtggttgaggtcttgtcttggacccttctgtctttttctcttccaataaaaagaaacttctcaagagaggcccattggacttgcaaactttatatgccccagtacagggaaacaccagggccaaaaagggggagtgggtgggcaggggagtgggggtgggtggatatgggggacttttggtatagcattggaaatgtaaatgagctaaatacctaataaaaaatgaaaaaaaaaaaagaaacttctctttttaagagcaatgagtgctcttgccctctggcatccagaccaccagcagtatcagcatttagagtgtcccactccagagggatatactgagatacatgttccttgggcttttcagtagaattgctaaacagtttacacaaatagaaatttcagaatggctggcccttcaatcagatttcacattccacaggcaagcaccaacataaaaaaacacaagacttatttcaaagaagataagagtttattctggagccaaatactagtgagtggtggcccaggaattcagatttaggttaccccaaacccatactccaatgtggtaagagaagtttgtataataacagaacaaagatttattttaaggccccccttcaaatgtactggtggaatcaacatggggcattctctgctatgggtcccagatgctttctgctgacactctaagactttcggctggcagaaaccagtgatctcgtaaatgaatacattccaaaaggttttatctgctagtcataaggatgtcaggtcatttgagaggactgaagatatagcccaagataaatcgtaattaggctctggatctgcaacattccaaccttcccatagtcattggagttcttatcagttatccagccttgcagaaggttcttttttgtccattcgtgtctcaggccagcataacccagcattttaaaaatgtacaacaggattagttaagccatgtaatttcctgtccaatctctttacattctttaaatgcatctgggttaatgatcaaaggtcatggggtaaggggtggaaaagagaaccagactatgattgcatcttcaaatgcctgggaacaacacaggctttgcctggaagcttgttagaagcccaggatcgtctctgaagcctggatccaaatctatagctcactttggttggtggtcagcgtccatgtctgaagtaaggctctcaggcctaggataacctcaggaagaaaagctggtgcaaccctggcatgggatggatatgataccaggtgtttatagtgctgagtttaggtttgtatgcaggaacatgtcagcctcaggaattgcagcagtatacatagtgtagaagcgaaaaatcctattcaaattgatgcatgaaaaataaccaaggatagaaaatgagtggcttaaaaaggcttggggtccggtgcaagtggggtgaggggaggctcaggagccataaaatacagggtggatgcgtaaggaaactacgtcagggggaaggggaatgtgaggaagcttgaatggaacggccctgcagctccttgaagcctgcacctgagcagatagttggccctgccctaccggtgctctcttgcctgattcacttaccctgccctgccctgccctacccaacagctttatattttctccctacccacctccccctccccttccccatctctttctctgtggtttctcttttcttttcttttcttttcttttcttttcttttcttttcttttcttttctcttctcttctcttctcttctcttttctttctttctctttctttctttctttctttctttctttctttctttctaaaactacttgtctggcttggggttgctgacttagtggttataacttgagattcactgagcttctaggcctagtaggtttgtagttttatcacttgattctaaaaaaaaaaatcttgaacttggaaataattttaattttttaccccaaactcacaggactacaaatagaagttatgatgcctgctgtttaccccagctctcatattatggggagtacccaggcttactctgtgcctgtcatgcctgtaccctgtttagctaatcagatcttcgattactaggaaatgcattgcatatactctggatggttatctgtaaatccttcagtgtgcataccctgagaacaagaactgtaaccgttgtgcattcaaaacctaaaatgggttgagcggtggctctgctccccaattctatcatccatggtttttttctgagcttctaccaaggccaggcatcgagttgtattgtcatgttctctttaggattctttaacctaaagttttccccacaatcctgtacaaggcacattcaaaacaggcaaacaaaaacatcagtttagggttccagagatgactcacgggttgggaacatgttctactcttccagagatcatgagttcccagcaggtggctcagaaccttatctgtaacttcagccccaggaaacaagatgctatgctctgctctctgtacacacctgcacacatgtaccagtgtgcccccctgcaacacacacacatacatacacatgtacacataattaaaaacttgaaacctgtcaatctggaagcaggtggtttttttctgtcatttgtatttctgttcatgtgtattttagaacttggatttgctcattttctcttttaatgtgaacaccaccgtgttagtgcatgactctgtaaatcttgtaaggaagcctgaactgactgatgcatcttttcatgcatctggcctaggtgtgtacacacaacaccacgggggatcactgtgagcagtgcctgcctggcttctatgggacaccttcacgtgggaccccaggagactgccagccttgtgcctgccctctctccattgactctaacaagtaagtgtcaggtcctactgtctggttctgtcttctgtggccagatccccactgatgtgtgatgtgaagttgccaagcaagactgtgtcatgagtgttacttagcatgagtgaccattggtgagagaggaaaagagagagttcttttgttattaaaaatctgaggtatttaatgatgccaagatgcacacacacttttctcctcttggacccgtgtctgccggatgtcttctcaagcgtacatttggctgtcaagacaatatgctgatgaataaaacattgttctgtgtttgatgagatttgatcagatgagcaaattgtgaaaatatgaagctaaatctgtcccaccaagtcaacaaatatgcaatacatgcctgctgtagactgggtatcaaagtaaatgatctacccagcaagctctccacccatggctgctggccccggggactcggtgcaatcaagattgcaatggaggccaattccactgatggtgggagtgggtgggctaagggacttacttctctggagaagctctggtgtcagatatgataaaaaaagggacttagcagccagagggtagtgagtatgacatgttgggacaccataaacacacaccctgcttgaggaattacagttagtcctgaagcagaaagcagggtatgtgttgatggagctctttacattaaatcctttatttcaggccagggaatgtgagttctatagaccagtagtttgttatcatcttttctctccttttcctcctttttggccttttcttattctccccctctccctcccctcctttcttccttccttcccctccccctccctctcctttacctcttttactctctccctctcctcctccacccctccttccccctccccccatgtcattggtactctccctctacccattaccagtgaattccctccacaagggctgttgcttgaaactctagtatgtacaactctgctgtattaggctctgccactaccacagaattctagaagctgggtatttaggaagaaaacacatctacatctgttagttcattctggaggttccagaacatggcactagcctcttctgatggtcccatggtgactgcaccacagtgctggactgtgtgctagagatgggtcacatgactcagaaataggttcaggattggcttcatgttttgtaacagctcactcccatgagaactaacatagtcacatcatcatgacctcggtcccaaaggcaatggcccagtgaccaagccaccccttcttaatagtaccaccatgtgacacaacctttctgtatggaaaatgctgagccatcccaaagtggtagtagagatagttaatggttggttgccaatgaaatggtgaggtactgtctgtctttccaattaaggatcccccctgtctctgtatatatatgtgtgtgtgtgtgtgtgtgtgtgtgtgtgtgtgtgtgtttgtgtgtgtatgtgtgtgtgtgtgtgtgtgtgtgtgtgtgagagagagagagagagagagagaaagagagagagaatgtgtgtttttgtatgtgcctgtgtatatatctatatctatgtgtgtctatgtgtatatggatccatgtatctatctgtgtatgtatatctgtctgtctgtctgtctgtaagggctgtcttccaagcttgaaccaccagtgctagtgaaccacagcagagagcatgagcgctaatgcttccagagcatccaaattgtcttcttggggagacaagatcggccaggcagtggggaagaagcagttagcagtacaggcagatgttgggagctgagagcccactgtgtgctgaagggcagagcaggaggcagtaggcacaggacactgatgggcatgccaggctgtgccgcatgtcagaggcattgcattctggtctaaaggctgggagagaacctgctgaccatttcttaggacagatgtatcagaaaacaaccctttaaatatttagaaacaagcagcgttcactggacaatcatgctcatttctaatgttttacagtttcagccctacctgccacctcactgatggagaggaagtggtttgtgaccagtgtgccccgggttactcaggatcctggtgtgagaggtacttggtgccaccccaacccccagtttcacaaagcagcagtaacattgtttcaaaaacccagtacacattttatattttcttcttaaatatctacaaatcttcaatgttaaatgatgcatatcagttgtccatacccctgtagatatgatgtgataattcaatatatgtatacactgtgtagtgatgggtgattagaatatgtagttaagtgtggtcttggtgtcttggtgcattgccgttattttctaagatcatggatagagcaggatgcctactgagagaagagtgttccacctcctggggcacatcagtattcacagcaaggacaatggcagacggcaagggagatcagtagttaccgttgtcacacgtctgagaattcagttgttcagacaatagtgagggcattgggtggtctgatttaagagtcattctctggcaccccaaaggcagtcttgtcttttcccatgtctaagccttgatgcttggttctggttcagcctgtcaagagctgggtgacattctcagtggttaagagaaggtcatggttgcacagcctctaggtttatgctcatttggatctgctcccatctcacaagaagaaaggaagatttgtggctctcgggatggaaagtcacctcttttccatagcaaatcttaagggaaagagccagtctgatttattagccatcccggggagcccctggctggctcagtaacatcttgagcagttctattgactagatcctgcttcccaccttgaatatagatgtgcagatggttactatggaaacccaaccgtgccagggggaacctgtgtaccatgcaactgcagtggcaatgttgatcccttggaggctggccactgtgactctgtcacaggggaatgcctgaagtgcttatggaacacagacggtgcccattgtgagaggtgtgcagatggcttctatggagatgccgtgactgccaaaaactgccgaggtgagtgcttgaaccagggggtcacaattgttattcattaccatgtgaatctcgtaacatttgtcagaaggactccacctggtggagagtgtcttagttagggttttgctgctgtgaacagacaccatgaccaaggcagctcttataagggcaacatttaattggggctggcttacaggttcagtccatgatcatcaaggggagaggatggcagtatccaggcaggcatgggactggaggagctcagagttcagcatcttgttccaaagacaaagaggagaagactaggttccagagagctagggtgatggtcttaaagcccacaaccccaatgacatacttcctccaacaaggccacacctattcccacaagtccataccttctaatagtgccactccctgggccaagcatgggcccatcacagagaccttatcttgaatctgtcttgtgtactgatgattcagtctccgattgatcagatgtggactcaatactcaattcctcactctgtattctatggtggcttaattagcggttatctctgaaggtcagaagtctagaacattcatacccatcatggtcagggatggggttttctttctgaaaccatggcggtggcacaccctggtggtctgctcatgcgctacctgatttgctaagttctgtttggagccttgaaactagggatgaggtagaacaactccttgagacagcttcacacccctgagatgatcagctctggggctgttactgaatctctcagcttttgtatttttgcatagctaagaaaaagctttattgtgtgagagtttgaaacatccatacaatgtatcacattcgtccccagccctcccctccagctcctcccatcctcttcaacccctcccaactccccactgtgtctcccttctgatatcctgcactcggctattaaacccatggagtcccttccaagctcaggtagcagtgaaggggggtgggggtggggtggggggggtggcacatctctgaaggaaactctctagtagccatcagccaccaacgcagcctgatagtcccctctctacatcatgctgccatttctgctatctccgccttgtgtaggtctagtttttgaactctgtctcaaggaagggatgcacggataataatgccacttgtatattttgataattcaaggtaaacgttggtcttatatcacagcacggagaagaggtggtgccaatcatacagaaaaataaaagtgtaggcacacattagatgaaaaagggcctggctttggctcgtcaacctgaacttcagcatcatggacaccttaatttcaaatgcagggaagtgggtggtagatgggtcaaattctaaagaaagatcctccatgatgatcactaaatctcctcactgaatttagcacttgcagtgtcccagagactttgaaaagtgctgcctcagcacataagagacccggaggacagaaaattagaggtgacgttgatggacatactagggaaagagagggacatggtagagggggtgccacagagataaacatcagttaagtatgtcaaaaagacagggagggagaaagagagggagggaaggagaggaagggaggaggcagggagacggggaggggaaggagagaaggcgagctgggagacctccagctagagagcagttatctctgcgttgatggcctgcaggcttcgtgctggggaggtaggagtcatgttcagagtcaggctatgggatgagagagtaagtcctttctaaagggcagcagggttgtgtctctcaggatctcaggcaaagctagggaatataccccacatataccaagggaaaccaaaagctggaaggaagccaggttctcaggaaaagtggattagccaggaagctgatcccaggccccctctcaggctgtcaagtcttcaggtccagggtcaacacccctgcttcggaggttgcttcccaccctgacggggctctcattgtctgtgaagtatgttagctttgtgaatgtgttagccttctccttatgggatcaaacggcttccactcaaattatctaagtaaataaatcaaacccttttgtgggtcttgtgtgtcctagcctgtgactgccacgagaatggctccctttctggcatctgccatctggagactggactgtgtgactgcaaacctcacgtgacaggacagcagtgtgaccagtgcctggtaagactgggcattgcatgatattcagtgacttgccggtgtttagaattgacacttagcctgcgtcctcgggcacttgaattcccatgggaagagcctactcgtaggcttggtcaccatgtgctgagccttccccatcaagagaacacggatgcagtgtgctcagaacatgcaggcagtgggcccgggaacaggcatgtactatcattccgagaaacaccttgcctgtgacttagagagcatcccattgtgtgttgaggagaaggcccgggagagcattccaccagcccactaacaccctggttcttcctcttttgtgacatagtctggctactacgggttggacacggggcttggctgtgtgccctgtaactgcagtgtggaaggctctgtatctgacaactgcacggaggaaggacagtgtcactgtggaccaggtgtctctgggaaacagtgtgacaggtgttcacacggtttctatgcattccaggatggcggctgcacacgtaagtgctggggtaccttatgttccccatcacacttgccctaccacctctcttggtgtcggagtaacttctatgaatgttacttctctcctgtctttatggtggggctctatacctgtcttctctttctaacactttggttctagcgcccgacctgcttgttatgtgaatttggctctagtttttgagacccccaaccgcagtccgcaagcagcagcttttgtaagggctggggggtgacatctaacacaattgacagctgataagaaggcaatgaccttagagcaatggtcctcaacctccttactgctatgagcctttactgcagttcctcatatgatggtgacccccccaaccataaacttattttccttgctatttcatgattgtagttttgctactgttaggaatcgcagtgtaaatatctggtacgcaggatgtgtcatatgtgacccctgtgaaaaagttgttcaacttccatcggggtttcgacccataggttgagaactgctgtcttctgtccttctgtccatcaggtctgtcccattctgttgacctctcagacccagggtgagtcaggatgcgcagctgcctcagggatagatgatgaggtctcgggaatcattgcatctcttttaatagtggttccaactattaataataattgtgctctcaagctgtcacacttgggtcacatccccccgtctgaatctgtgatgcttcttttgtttcagcctgtgactgtgctcatacccagaataactgtgaccccgcctctggagagtgtctctgcccgcctcacacgcaggggctgaagtgtgaggagtgtgaagaggcatactggggtctggacccggagcaggggtgccaggtgggtgctgccaccgcgctggagtgagcattcctcccctgccgcaaactgactttatccagtcacctggctttaagcggttatattgccatggttcatatgtaaaatcggtacaccctggaccactggccatgcacctagagtcccagctacttaggaggccgagtcagggggattgtttgggtttaattataggattgtctggggagatagactgtggagacctcacctttaaataaataaatgtataaataatggacttggaagagtgcaggagaattagcatctttcaaatttcttattttgggttttcttcaagaatttagctgtgaaactgatagatagaaatgtgcattaatatagctatataactatacaattatatacttatctatctatatgtagttttatagatatatagatattgacctttaaatatgctttcaactaatctacattctatgttttcaaccaatatatatattttccagtggagctgtcaatagtttcattagagaattaggttgaatccaagagctcggttgtcctggacttaattagcttagaattaggtatgcttgggttttagagtagtggggatattacttctcctctataatatttttgctgagctaattgcaccattagatttaattctagttcagagatttaacgctctgtgttggtgtcaccaaggtacacacaggccttgccaggcagcctatggtacctggcaggacagctccacttaggaacagcgcaaggtcaattcatctacattatgccccagatggtgtttcttctggtgtctgagtttctgtactttctgaggacataagttctgcccttatattaactctctctctctctctctctctctctctctctctctctctctctctctctctctctctctccccctccctccctccctccctcccaggcttgcaattgcagtgctgtgggctccacgagtgcccagtgtgatgttctctctggccactgcccctgcaaaaaagggtttggtgggcagagctgccatcagtgttccctaggctacagaagttttcctgactgtgtcccctgtggctgtgacctgagggggacactgcctgacacctgcgacctggaacagggtctctgcagctgctcagaggacggtggtacctgctcctgcaaggtattgtggatcttcgaacctcagtttccttctgctgttgtcctcctgcccaccccaggggcgtctgactacttacataaattctaatcattagaaatacagtttcaacccctttctcggattgtttcatacttctatatcacctgccagtcaaaaaagctgatggccaatgagctggggcaagaaataggaggtgggacactggcaggaagagagagcattctaggaagcggtgagagataaaagatgagatgggagagagactcagggagactggccgaggagacacatgtagagaaactcagagagatgccgagggagacactgaggagaaacgaagggagaagcaggctaggactgaaagagaggttaactaatcattggtagacatagactagtttaaattggttaagtaagtggagagctcttcagggaatgagccaaagctcatggcctaggcctttaataataagcagtctcagagctgtcattcggaaagccagggccaagaaaggaaaaatggatttaaagttattgtaacaattcacagtgttctcccctgaaatggtggaagaagagtcttagaacagaattttaccacttacaagtgtctggtgactcaacttctctgaaggcagtgctttctggcatgcaaccatggattgagtagccatccattcttgaagaaacaaagtagctagcaaggctgtggggaagatatttgggggttttatagctatgctctcagaatggtgagatttgctaaagtaaagggagactatgtaaaatattttcccatgaggtaagagtttgatgtcactttgacttacacatgtgtcctttggttttcccagcatgctttgttgcctggtcactgccaccttctatagtcgtctgtgagaggaagagaaggaggagaaggcagcctcggcaggggtgttggtgtagggctagagttgatgaaggaaggattcacagaggttcatgtcttaccatgtctcctagcaacagtcctaactccagtccgaatggcaaggacctggctggccttcactaggcctggggtttcatctggaggccctctggatcgcctagagaccatggagattaacattagcaaatatgtcttggtagtttcttccaccatagttctgatcctcagtcataactcaggagttctgagtatctgacttcagtgagaagcgtggccaccagagactgagtttagcaacgcgtgttttattattttgtcagtgtgttttattattctctttgtgtgtgtgcataaagtcacatctcttctttttcaggcattgatttattttctttccacctgtaggagaatgccgtgggcccccagtgcagtaagtgccaagccggcacctttgccttgcgaggggacaaccctcaaggctgcagcccctgcttctgcttcggtctgtcgcagctctgctcagagttggagggttacgtgaggactctggtaagccacatacctacagtgaaagcgttttagctctcttgctttggggagtcaggtgggcattgggagagaacaaagacattagaaatcctaggacagtgattagctggctgtatgagtcagtcctctgatcacttcttcggtcaggtgatataagcagagataaaggctatctatgcccaccttcagctgatccaccaaaagcttttcttggaaagaagaaataactataggatctccaaagtgtatttcctgtcactgatgctccagggtagcaatcctttgaacctaatcaatcacagtgccttggacatcctgatccaagcctgcgacctaaatgaagtctttcctctctggtgttaaaatgaagcttttcttttggggaccaccaggagaatctgcagattaaatctgggttgtgtgtgtgtgtgtgtgtgtgtgggtgtgagtgtctgtgtatctatgtgtgtgtatgtctgtctgtagtgtgtgtgtctatggtgtttctgtgtgtgtctgtgtatgtgtctgtgtgtatatatgtgtgtctctgtatgtgtctatggtatctctgtgtgtctctgtgtgtccgtgtatgtgtctgtgtgtatatgtgtgtgtgtctgtgtgtgtgtgtctgtttgtctggtgtctgtgtgtgtatgtgtgtttgtatgaatgtgtctctgtgtgtcagtggagtctctctgtgtgtgtatgtgtggtgtctgtgtgtctatgtgtatctgtggtatgtgtgtctatggtgtctatgtgtctctgtgtgtctgtttgtgtgtctgtgtgtatctctgtgtgtgcctgtgtgtatatgtgtgtgtgtctctgtgtctgtgatgtctgtgtgtgtatgtgtgtctctgtatgtgtgtgtgtgtatatgtgtgtatgtgtgtgtatgtgggtctgtggtatttgtgtgtttgcatgtgtatgtgtatatgtttgtatatgtgtgtgtatgtgtgtgtctctgggtctgtggtgtttgtgtgtttctgtgtgtatatgtgtgtgtgtcttgtgtgtgtctgtgtctctgtgtgtctgtttgtgtgtctgtgtgtatctctgtgtgtgtatgagtgtatgtgtgtgtgtatgtgtgtgtgtgtctgttgagtatgtgtgtgtgtgtctctatgtatatgtgtgtgtgtctgtgtatatgtatgtgtatctgtgtatatgtgtgtgtgtctgtgtgtgtatgtgtgtgtgtagtggggtgcacgtgagcagaagtcagaggaggatgttgactatgccctctccattattctccactatttcccctagaacctgggtctttccttaagcttggagttggttagaggcccttaagtcacagctatccctctgtctctgcaaccccatagcactgtggttgcagatcagcaatgcagccaaacctggtgctttacaagcgcgctggggattaaatcccaggtcttttgcttacccagcaattgctgttagccactgagttatgggtacttagctcctcatataacgcacatctttctccttcccatccctagataactctagcctccgatcagcccctcctgcatgtggtttcacagagcaacctcaagggcacaatcgaaggcgtgcatttccagcctcctgacaccttgctggacgcagaggctgtccgccagcatatctatgcagagccattttactggcggctaccaaagcagttccagggagaccaggtgagcagacatcagctagccccttcctgttccagaaagaacctcagattcgatcttctgcctgtcactaaaggacttggatatccagtcgctcttctgagtgaaggtggagatgttctgtggttataaaaatccccacaaaggcttggaatttcaaacgtttttatttttaaagcttttacggtttcattaatttgcattgtttttttctcttttctaaagcaataattcaagaagtctatcgtataattaccagtagcagtgctaggtctgacccgggagcccttgtatagaaagctaaagctacgattaattggagagctgcctcttatgaacacaactttcagtgcagcgccttgtttataagaacatgagttcactctgatctttatgttattctggttttttgtttgtttgtttttgtttgtttttttgaggtaaggtttagtgtgttagtccaggctagctgcaaatttccaatcctcatgcttcagtgtagcgtcctaagtgccaggataactgatctacaccaccgtatgggctcactttgatctttaaattttaaaaatctaccccagttgtcctatagatatagatgattttaatttaaagagcctgaaattagaatccttacctcaccagtttcttctgagactgagtttggtggaatgaccagactagtttcagtctatctcacagaccatcaataagcagcattaggtggaggcagatttccctaggacaaactaactcccagttggatacattgtaatgacaagctttgcataaagtggccttaaactaaggctgccccagaggaataatgcaagtttgttgtttgttagctcttggcttatggtgggaaactccagtacagtgtggctttctactctacacttggcaccggaacatccaattatgagcctcaagtcctcatcaaaggaggtcgggccaggaagcacgtcatttatatggatgccccagcgcctgagaatggagtgagacaggattacgaagtgcggatgaaagaggtgatgtatggttgtcccacatatgttccttaggcatgcgaactttgctgtcaggctaagaaaagcccagagccaggagaccctgggagacagcctccagccagctgacagagagttctaagagcgattcatatttcatggcttcaacaaagccaaacgacagtagctgtttgcttatctacagctttgcttttcatggagttggatgttaagtcacctgaagtccagatatatcaaatggaaaattccagaaacaactcttaggctttaacattatatactgtttctagtctcatgataaaaccctacatctttctgccctgccctgccctgccctgccctgccctgccctgccctgccctgccctgccctgccctgccctgccctgccctgccctaccaggatgtgtcttcccccttgtatgtaccacctgccttgtaggttacagcaaatctttgtcagttcattgacctacccggagcagggctgatgtctgaagctgtctgtaaaagagctgtgttctccttttaaggttgtgtgtctgtgaagctgtgaactctgaatttcattggtcccatttctcattcacaggaattctggaaatattttaactccgtgtctgagaaacatgtcacacactctgattttatgtctgttctcagcaatattgactacatcctcatcaaagcatcatacggccagggactgcagcagagcaggtacttgggagcttttagaacgtcacgtgttttctttacctgatgcagaagtggaagatctgtcccctcactccaatgacttatgtctttattcatagatagatcactgacccttgtgtaaatcttgccagtattgacggcttattagtcagtgttttgttgctaggataaaatgcctgaggggaaacatatgatgaggagagaaggttccttctggttccgatgctcgtctgttgctgcgataaacactctggcacaatgtacattctagaagaaaaggtttattttggtttagggttccacagggctagatggtgactgggaggtgaacgcaggcgcttaggacagaaagcttaaccacataggcgatgctacatgaactagaagtggagggaagctgtcacccctccaagtccacatcctcccctcagcgatatgttccctctagcaaggccatacccatacttcttaaagctctatgctttccccaacagtgccaccatcaggggatacacaagcctgtgcggggctatttctcatccagacctcaagagggtcatagttgaggaggttcgcatctgtgttctgctggctccatcacatactagctgctcaattaattcatagcagtcaggaattagaaagcaagcgagccagggctgggtgcaaaatgtccccttaaaagcatgccctcagatggggaccctgttataaacacagtagctttgtggggtattccatcaggactatcatactataattatgggatggagggtgttaactacaactattcgcctcccatcttagatgaaatagaacacttctttataaagactacatagacccctgaaagctaagctgtcctcccccaaccccccttgtttttggaaccatgtctaaggataaagccactttctgtgatacctcataaggaaatgtagtcagtgctgggcagagccgccctggcagggtcttgaaggtgttcagacttggacctactttctgtcaccgcctattcctgctgcatgctgacatgtctgcaattgttagcagcacttctccacaggatgaggtctcggctcaggacagatgtaaatgctaaaccttgtacaatgtttccagaagtttgtcacattgtaaatgcttcttgccctgcctctcttcacaatggtgccccagaattgccaacatttccatggaggttggccggaaagctgtcgagctgcccgctgagggcgaggcggcattgctgttggagctctgtgtctgtcctcctggcaccgcaggacactcctgtcaggtagggaaccttcagttcactctgtgccctgggatatgctcattgacaacaatcctgcatggggtagcaacacaagagcatccacaacttggcttttgaatttataaatgttagtttgtttaaattcagatttatggactccatcaacttttgagtgtaagatctggcagcatgccatgtgcttacagttctggggatacagttgttctctagaatattcttttctcttaccaaactgaacctgcatctcttaagccagccctccacttgctttctgctccttgggaccctggctacctctagtcccccaatgagtggaatcctgaagcatttctgcttttgtggctgccctctctacttagcacattgcctttgggcttcctccaggtttaacacacactagactttctttttgaggctgcatgatatcccatcacttggacacagtcattatttttctgtggggccttgggttgcttctgtggacgctgctgtgaggaagggaatgtgagtgtctcttccggatgctttatgctgttctttcgagcccaccagaggtagacttgctagccttggctaatgtcgcttttaattttggagaaccctgcagtctctttcctctgtgccagctgcacacaagcacaccacttcctttacaggcccaacacgtgttctgtgttgttactttggcttttgtgcagagtttggacttttacttttgttggtggtatagtgttttgagaccgctattttttttttcactctgcagccttggctagcttgagacccacttcgtagcctaggctagactgcagctcacaggagtccctgtaggtgtgattatccgtaggagccagcatgctcagcttttagcttggatgtgatttgcgtttcttcccgatagtggtgtggtgcttgcgtgctgctagccgtctgtaatcgctggagaagaattttcatcctgtgccaagattttcaccaaggtctactttcttgtgccttttgtacccttttaggactgtgctcctgggtactacagagaaaagctcccagaaagtggtggcaggggaccccgccctctgctggctccttgtgtgccctgcaattgcaacaaccacagtgatgtctgtgaccccgaaactggaaagtgcctggtatgtttgcttgtttgctaaatttacacgttatcagcgtgacttaaaaggagaaggctagggaccagacaggccctccaaggacctccaggagttccttgctgccatctctacctagaaggcatctctatctctacatcactggggcactgagtctccctcagcaactaatgtcgcctcaactctagtcctcagtagcaggactcttgtcactctctaggatggcagccaccaggaggccagaatccactgtctgctaggggagctgctttgtgctggacttgacattccctggagaacacctagagatgtctctgtcctatctcgtcttctagtacttggtccttgcctgtgacatgctatgtcagtgaaacagtgtttattgcaatttatttttttaagagatcacaaagaccccattctgaagggagacagagaggccaagtggatcctaacaaaacctatctttatcagttgaaatgggaataaaattttaaaacaaatttggtcaagtgttttctagttcgagagcctataagtgtagttttgaaatatttcttgctctgtcacttcttgctgtcaaggggaaaaggtgattgccctctcagggactctggttctggtgtgtcccctcctcagctgcaccatacagggtactgtgtgcacaggggcagagcaaatatgcagggatggtacagcacagggttttaaatagaatcggtcatgaaagttgctcacactttgagcttaaacatgcatctatatactcttttctttatcagtcattttatttgtttacatttcaaatgatatcccccttcctggttacccctccacaaaccccctatcccatccccctttccccatcccctttgcctctatgagggtactcctccatccccttggccacttccacctcacccctctagcatccccctatgctgggcatcaagcctccctcctctcccactgatgtcagataagcccatcctctgctacatatgtatctggagtcctggctcccccccatgtattggttggtggtttagtccctgggagctctgagtggtccagttagtgatttttgttttgttttgttttgttttgttttgttttgttttggtggtttttggtttggttttgtttgggtttttttgtttgttttgtaataaggtctctggctcaactaataacatcgtattttaactgatcataactgatgtttatttggttgttaaaagaatttgccacaagtgtcctccctccacgggttgcttcctaaatcactggctaattctcttcatccagggcagctgccagtgaatactgaacagtgacttagttacttttctgtcaccgcgagctaacaaaagggagagtttattttgagtttgggttccagaacagggagtctttatggcaaagcagtcgtagcagccagagtaggaagctcagagataggtcacatgttgcccacacacaggaagcagagaatgaactgggaacggggtgaggccataaactctcaaaggccagccccagtgacttgcttcctcctgcatggctccatgcagttctaagttctcctcatatggcagcgccaactggagaccaaacacccaaagacacaagacgtttctcatgtcagccacatcaagccctagctggcatgtggacacactgtcgggtctctatctactttagatctgcatttcgaagatctgagacctgactgcttttgggtgccaggtttgtactccttctgtagatcatattggcagtttctaggctatatgacttgtcatggtcttatagtgaataaaggtcacagatttggaaaagcttccagagccctaggaaatatgaagagaaatgcctccatcttccctaagaattaaagagcgtctctctgataggaagcatggttggttatagaactatcacccggtagcattcatgtctgactgtttccattgttcctactttgaaatgtggaacttcagagctgcagggaccacacatccggggaccactgtgagctgtgtgcttctggctactatgggaaggtgactggactgcctggagactgtaccccgtgcacctgtcctcatcaccctcctttcaggtaagcctgtgccgaggcagcaggacacagcagctccgtccacttacgggggctctgagtgctctctgttaatgtcgtccctgtggggagatgctaagcacatgctaagaggaagtgtgtagtctcggggctgtttgaataggattgtgttggtatggagggttagaatggagccaaatttacaaataggcctttgggatttttcaaggcaaattttagctctcagctgtgtggtctgctgtgtgattcagttccttttgatgtaagggaagagggtggtgtagacgtatgcctaggatgaaacacacaagccctgagaaaagatacatgatgtgtatctgtcagtcaataactcatttgggggccatcgcactgcctatgctattgactagacaatgttgacaccattctgaaaaaaataataatttctgtatgtgtattccccatctgtggacagtggttttgtgcacccagagatgtgcacacatgcctgtttcactgtttgctttacatatttccacatggtttggataatgactttgtcgtcccccgaacccttagcggctacctaggaggcaccggaatgaacaacttggagaagacccagatcgtttggtttatttcttaggcatttgtgtctccttgaagcctcgttatttaaggagagagatgttagaggtagtgcagggctgggaactctacctgtggatctccagctttctcccctgcaaggaaccagaccagattcactgctaggtttgggtgaggtttcagtagtttgcagttacccactcccatctccaggtggcgcaggacagtctatcctgtggaggcagagagtgtgaccaaaaaggaaccagccaagtagctctatcaggttacttctggtctgtgaatgactgccagccactcattaacccagaagtcagcttctctgcggctggtcctctctgctcattgccatagcctggggagctgtgatgaccagtgagatgcggtcttcctaatccccatgctttatcaattctgccattagctaataaatatggaaacgcctcctctgagaataagaccccttttgactgggaaagcgttcttggctagctagctataatccaggaggctgatctgcgtagtactcacctgatgccaccttgcaacaagggcctctttcaacacaggagacaagagatttgtgtccataatcctgcccgcaggttccttttgttctatagatttaagctctagttcatctagccatgaagtgtgacgttttgaacagtgaggatgaataaatatttaagaaagatttgaaagccaggttcctgaaactttctggaaaaagaactttctttcagtttcagccccacttgtgtcgtggaaggtgacagtgatttccggtgcaatgcctgcctccccggctatgaaggacagtactgtgaaaggtatgccgatggcctgtcacaaggaggtagatagggacacctgctccttttatagcatatggtgcatgcttatgatagcaatctgggagtcgatacaaatgtgtgtgtttgtacagatgggtgaccacattgctatcctatagcaaggtctcctaaagtgagtgggggctctgcagttcctttggcaaaaataggtgattgcccctggacagagtgtgttcctggttggaaagacagctctgtcctacgcctcttttctgtaggtgctctgcaggctatcacggcaaccctcgagcagcaggtggtagctgccaaacgtgtgattgcaacccccaaggctctgtccacagtgactgtgaccgtgcatccgggcagtgtgtctgcaagccaggagctacagggctccactgtgagaaatgcctgccgagacacatcctgatggagagcgactgtgtttgtaggtgattctcctgtgtgtgtgcctaaagttgggtttccctcactgacgagggacctggctacagcacccacagggtcagtgggataccacacattgcactgtactttaagttttgttacatttcctggacacatattgccgttaaacctactgaattgaacctttagttgtgcatgaataagccaagacacctttgattgtggtagtctcttgagatatagcccaggctggctttgaacatcacagttctgcctcaatttcccaaggactgactgagactaaaggcacccagctactaatcttgactgcatcatttagcagtgtcagtagttcctttactgaaaccaagcatcagtaagcctggaagagaacacccctgtggggttctcatttgtattgcccaaacttcaggcctctttagttttctccagttttgatggatgtctctgtcaagtgcaagacaaggtccccctgggaagtcttcgtgggccattgggatgctatctcgtgatactcaagggaaaaggttttggattttgtttctgtgtttgtgctaagtaaataaccccgattctggtctccactgccctctgtccttgaggaggaagtcctggaacgcccagactgtggagacaaggctagaagggaactgcggttcttgttaccagtcccaattaagaggaatgaagggtcaagtgggagggaaggagagctgaccactgggctccctgtcctttctttgtgacactgagggtgtgcctttgctgagcctcagtcacctggttgagaattgcagctcccctatggcaggaatgtgaatgagatttgtatggttcacggggccctgagtgtgcgttctccttccaataaataccatggcttgtgtagctcagggataaaagcctattgtgttagctttgttttctccctgtgttctcttcaagcctgtgatgatgactgtgtgggtcctttgctgaacgacctggattctgttggtgatgccgttctgtctctgaacctcacgggcgtttcccctgctccctatggaatcctggaaaatctggaaaatacaactaaatatttccaggttggtgctagggatatagagatggtggctaggaacagctgtcactgagggagaaggagtgggggtaattttctccccaacctttcagtcccccatgtggcctgggacagtgaccttatcccacacttcccttgggtttctgggagctctaatggagttgcttctcagaaacctatttgggtattcacggattttgtcccaccttctggaattaggtggcacctcctgccccgacagacctctgggtatttgaaaaagctgtgtcaagtacaaatactagaaataaacctcagccatgtctgcttcagtgttggtttatgccaaagatgagccattttctgatacatgctgctatttttaattagagttccaggacacaaaaaatagtcttcctcctcggctgactagtaaagtctccgagggtccatccttggtttatgttttagcaaaagatctggtcaacaaaggcaagaaaagttaagaaattgactcagagacagcactctcctctggaatggtaattctcattggaaaaatgttgctaaattatattttttacctctacattatatttaaaataatctattcagtgtgtcatgaagtaagaggaatggtcattactaagcactagattatagatagaagcttccccttagtgtgtgctcactccctcacacatgcacccacacattcactcgcacacttacacaagcactcagaaactcacatgcacacatgcactcaaacacacactcacacatgcacactcacatgaactcacacacacattcaggcagtcacacacacacactcactcacatatactcacacacacacatgcacactcaacactcacatgaactcacacacatgcacatacagacactcacagacttacacatgcacacaagcacacactcatccactcacatatacttatacgtgctcccatatagcatacactcacacacaacacatgctcacacacacagactcacactcacacactggtactggggaggagcaaatatttttacatcacttcgtattgcatagccaaatgtgtttttcgaaagatgggggggttagtcacagtttagtcacaggagtatagctgtgttttgaatttatcaggtaactaagtagttgactcagatcttaactaagcctgactggtttgttctaacctacccactgatccccttaacaatgcttcacatttgtatccaaaactctttggagggtaggaatgtgaacagaattgtttctattttttaccaatagagtgaaattgggcaatgtacctccacccttccctaaatagcaatgtgatcgctctatagcattgtgaaaggttttaggcagagaagaaaagaggttagaatgttggaatggattaagcacttaattataaaccattgtgatggcttcttattggatacattgtaactttagcctaggaagcactcctttatgttttgacaattatcattaatagtttacaaccttgagagtcaaataaagctgtatttggtctacaaaattgccacctatctcaggttcctcttaagagaccagtgtttgaatttatgtccctgtaggagccacacagaaggcagcaccatggagggacattgctgtaattgaaggctgatggtgtccaaacatgagtccttttcttttaagtaactcttaaagaaattaggatgtcttctgcataccaaaaagcaattagcccatgactctctgaagaacggaatactttaaatgtgacacagtcagcggtataattgctttaggcagtgtaatgtctgtcttttggttttcctagaggtatttaataaaggaaaatgccaagaagattcgagcagagatccagctcgaagggattgcagagcaaacagaaaatctgcaaaaggaggtgcgttctctacacaaagatccggctccagacagcctgtcagcacagcgcctgggagccattgggtctaacctggcaggttctagaggttctgatgagctgtacagcagacacatatcaacaggcagttctaaccgaagcttccctgctgcagtgggaaaaggctcctgattggccactgttgccctgggtcgctaaggaagaacacggtgatcagcttagcttcttgccttcgcttaccctaagtggtgctccaagataactgaaccatcccacctttcctaagtcgagtctgtcatggcgtttgtgagaagcctgggctgtctgttgaataccaaccagcctgcttgattcaacttcccaagcaaagcagacagtgtagaatgctctcaggactcatttgtcttgtcattcaatgacgcatgactgtctacaattggatgctaatgtggatagagggctttcgctttatggcgggggttcgaaacctgtaggtcatgaccccttttagggggtcaaacgacgctttcacaggggtcacctgagaccgtcggaaaacacggattatttacactgaagtttgtaacagcagcaagattacagttatgaagtagcaacaaaagtaactttatggttgcgggggggtcaccctaatatgggaaaatgcattttaaaggggtacagcatcaggaaggttgaaaggcactgcagtaggaatgcaggaagcaccttgacctgctctgctcatttagattgtttataaaaacaaaccatctcttctcatggtgaatgtgtgatttcaatacccacctagtcaaatttttagccccgaaatattaaccttggttcgagatagcatatattttcagttctggatatattttgttgcttaaaagaggcaacagctagagttcagaaatgtgagcgatactcaagtaactaggctgaatctctcctgtctgctcagctcaccagagtgttagcacgccatcagaaggtgaacgctgaaatggaaagaacttccaatgggactcaagccctggccacgttcattgagcagctacatgcaaacatcaaaggtagcatgggcagactctccactggggacttgtgcttatagatagtaagagtcatggtcaccatgtgatgtgtgtgagcagtgcaggactgggcttcctagggctgagggactggaacatctgatagcacaagcacccagaaacgttcaggtcccaggcttccgcagagtgtttcctgttttcaattctttattatgcctggcacttggatccatatctccagcccctttccagcaaagttgaaatgctctatccatgcctacttacccacaagacagctgacaagcttggggctcctgcttggtgccagctaccctctcagagtgcttctgctgctcgcttacaccgtctagcgtgtggttgtcggtttcttgactactagaaaagttccatgctgttcattcagagctatgatgtgaagcatccaaggcacagaacgcggtgccgaaaagatttatggggaatgagtaggagaaggatcagaacaagaatcgctcagtgaaagagtggtgccgggtagatactgctttatacaggagatatggctgcaaagtccacgtctgcccaggcacagggcaacatggtagcgaacatagagccagcccttatggatttgtggctgtagaggaacactaccattaaatacgccaggaatccccagtccctgggggtggcttgttaggtgatatcagagagcacttgggtgcacagggtgcttagaggtccaatccagcctagatgttccgagctttcctcaccaaagagcattccacacgcttccattcactactgtctacccagaagagacttactcagtgatgaatcttctccatagaaatcacagaaaaggtggcaacgttgaaccagacggcgcgtaaagatttccagccacccgtgtctgcccttcagagcatgcaccagaacatttcgtctctgctgggactcatcaaggaaaggaatttcacagagatgcagcagaatgctacccttgagctcaagtaagtcctgcgtggggtcagaacactatcatcagtgagaaccaggtatctggatgctgggagcgggaaatgatggagaaagtgatggctgagaattaatattgccagagaggagagaggccggtggccaggaaaggaggagaggggcatctgcccctccaaatacagaaaccgagtaagcgaaatcagtagcatccatcactggcccagtgctctaggccccttgggactctacattatttttccctcctatacactaaagagcccggtgaactgttactgtacagatagatcaaggacaaggtaatctgtcgggaagagaataaagtaggatatcagatcataagctggacactgtcagaaaccctgaacttggtcatacaagccctcatgaaacttcatgcgtgaccccggagaatggtgtacacggatcggggtacttgtgccttccttcctgggcctttcctaggttttgttttgttttgttttgttttgttttctcacacattggctttctgtcaggcagtttcaggattgttctaatcacttacccaagactcactaaagctctgctcttcctggtagtatttgaggcgtttgtatattttgttactgtgaacgatcatgggattcaatgtctcaggcaagctgtgttttttagttttccatattgctatgcttaatattaaatatttatactgcaagttctcttcctcttcctcctatccctcctctgcttcctactgctcctaccttcccactccctccccttctccctttccctctctccccgcctccttcttctcatcatccttatttcctcttttttcttctactttgagacagggtctcactacgtatcattgcctcatcctcctaaaagctgggattacagtctgtgcttctacaagcagattatgaacccccttttctgtattttggggtattatcttaccagagtagacagtggagctagatcacttagtcaaatcatccccactttggggcatgttaaaataaagtactatataccttccctacaacacacacagcaccgtcacatctccttttgtccttgaacacattttttttttgacccgtggctttgagtaactagaacttaaaaggaaaggcttgtggttagatagggtttgaaacgaggtcttgtggtctagttacttggttcaatgaaatctggggaggccctgggaaaactgaactgcgtgttataaagtagcaagatgctagagcgggaaccaaggacacagaatgcccatttatgcagtgaggatgttggcttccccacaaaggacagaatttatgcctaggaaggagctgattaagcaagcagtcccaggctggcagtcctggggattcagtcatcctgcagtatgccccctttctcatggctccccgcaactgccagttccttggttcgctcaacagaaaggattgagccccaggtacaaacatggtgtcaggagttggcgacacccagagaaacagtagaatttttatacccaccagaacttctagaccacttaggaaaagttcgcttttgagtatacatttgatgtaagacacggaaagtagcaccatcccctctctgcctaccctgtcccctgacctccccactggctgggtcctctggggcagcctcccgtattactgtggctctctttctgtttggaataaagctgtaaatcacaatccatatttctttcttctatctatatgatgaaggggacttttattttaaataacaggggtgggggtgaggtaggcgggttttaaagtgtattctccagccacccactttctagtttccatagataatcctcctcccagtgtcatagattatttatcatcattttaccaattataatcattgtaaaattccaggttggtgcctgagtctgggtaaacagttttggtacatataccagtcattttcatattatgccgggagctcactgcaactcccgggccttgacgtgtaattgactttacagccaagattctttaaggctgtgcagccagaggagaaatgagatgggaggagtctgtgaggacgtgtgggaaggaattcactggagttaccctatacctgtttccccagtagggagcatgcagtacgggtgatatacctgcccggggaagccattagaaattcagtatcctttgctttactgggcgctggtcatccatagagctcatctgaatgccagactcccagcaggaacttagtgctcatctgaatgccagactcccggcaggaactcagtgcttggactcccggcaggaacttagtgctcatctgaatgccagactccctgcaggaactcagtgcttggactcccggcaggaacttagtgctcatctgaatgccagactcccggcaggaactcagtgcttgtccacaatctcctggcttgcacagtggagccactcactgtcgtatcagtgggaggagtgtgtcgatacttacaaccttacccactggcctcgctgaagacagcttactccagcttgccatgtgaccttgtctccacacactgcagatgatcccgggcagctgagtggaccatttcctcctgttggcgagccaacaagtgttcaaagataacttcaatacagaaatgtgttctgagatgagtgtaggaggggcagcatgtaccaatgggaccagctctttactgcctgtcttcctgtttcaggatactgatgtgcatagagagtttccagggagtgggtagactgaggagtagaccggagcatgctattcttgtggagtctgcttggtgggattgcaaaaattcatgggattgcaaagaacagcaatctaaggggaaaccacttattctccatggcttcacaagaagctaagagtgtgatgtcaccgatccagttcatgtgattgaggccactgatcacgtttagaaaggaatagagggaagtctcctacatagacagtagcacgcctttaatttcagcacttgggaggcagagacggatggggtcgaggttagacaaattaatccctctgtgtttgaggctagcctggtctacagagtgagttccaggctagccaggacaacatattaagatcctatctcaaaaaaaaaaaaaacaatgaataaataaataagagagggcaattctttcttatttactaaaccttgtgtttatcaatggtgacaattgcatcttttaagcaatttgaacttcaaggtttttgtaaaaactgtttaatcagcctcaaaaggctttttccaccctacaaataagttgccctcttctttcagtctcttgcccagatgcagttgccactgataacacagaatatagtcactgttttccaggccgggcttcactgaggtgacttattttaatttcagtgctaaaatgtgaggagaagttctcgaatacagtcagtgtgtttacctaggaaacagccaatctgcctgtaactgttgctgtcccagtcaagggctggggtgatggctcgctgggtaaaaatgcttggtgtgtgttctagtcctgattcaccaccgctgtgatgaaacaatgactaaaaacaccttggggacgaaagggtttatttcacttaacatccacattgctcttcctcattgaaggaagtcaggctaggaactccaacaggaatgctacacatgtgtgacatggtatccatgcattccatcccccattacacacacacacacacacacatgcacaggcacacatacctacatgcacacacaggcacagatgaacatcatcagaagaagaattgcctctggactcaagcagtcaggatccatgctaatcattgtgattcacattcataagcctagcaacaaaggaatgctgaggcaggagattttattttgtgtgtgagttcagtatcagcctgagcagtgtagcctaggcctgtctcaaaaataaagtcagtcaccatacagtctcttatattccaagaagaaactatgaatgcataaaaatccctcattagcatctcaagactcaagctttattttttaattagatattttctttatttacatttcaaatgttgtcccctttcctagtttcccctctgaaaatcccctattcccccccccttccccaacccatccactattgcttcctgtccctggcattcccctatactggggcatagaaccttcacaggaccaagggcctctcctcccattgaatagctgagtagtactccattgtgtaaatgtaccacattttctgtatccattcctctgttgagggacaaacatgcttaatcatcagggaaatgcaaatcaaaacaaccctgagattccacctcataccagtcagaatggctaagatcaaaaactcaggtgacaacagatgctggcgaggatgtggagaaagaggaacactcctccattgctggtgggactgcaagctggtacaaccactctggaaatcagtctggcggttcctcataaaattggacatagtactaccagaggatccaggaatacctctcctgggtatatatccagaagatgttccaacttataataaggacacatgctccactattcatagcaaccttatttataatagtcaagctttgtttttgtttacgttctaagcgaaccatttctattcatcagggctgctaaagacttattgtcacggattcagaaaaggtttcagaagcctcaggaaaagttgaaggcattgaaggaggccaacagcctcctttccaaccacagtgaaaaactgcaggctgctgaggagctccttaaggaagctggaagcaagacccaggagagcaacctcctgctgctccttgtcaaggccaacctgaaagaattccaggtgagtctcagtgtctccttctccgttaggagttgcaactacaccggcctgtttgtagatagcaccaactttagctcctaacaaagtgagcctggctactggcttacaggtgacgctcagagccaaaatcgggtgctgactttctttcatgatatatcctcaattggtgattttttgatgcaggagaaaaagctgcgtgttcaagaagaacaaaatgtgacctcagagctcattgccaagggtagagaatgggtggatgctgccgggactcacacagctgctgcacaagacaccctaacagtaagttccaatttggacagcccttgccattgccagagcagccacagacctcgccaacgggtgcgcgcacacttgtagctaaacagtcacatgtgtctgttgtaatctctccacgcagcagctggagcatcaccgagatgaactccttctgtgggccagaaaaatcaggagccacgtagatgacctcgtcatgcagatgtccaaacgaagagcccgtgacctggtccacagggcagagcagcatgcctctgagctgcagagcagggcaggagctttggacaggtaaaactgctacacagtattcatagtccaggaagcgtttgctggccctcatcccaagggtgagggtggccattttggttcgtgctgaatcatttttatgctggttttgcatgcacgcccccgcatgcacactcctgtgtgcctgtgcttgagtacacacacacacacacacacacacacacacacacacacgtagacgcatgtgtatttaagtggatatgcatgtaaaagccataggacaaactttgatattgatcctcaggtgtggtgcacatattttaaaacaatctcttgctgaccaggaattcaccatgtaggctaggcttgctggctaaagagccctgtctgtcataggctaggctagctgacttgagagccctgtctgtcataggctaggctagctgacttgaaagccctgtctgtcttagtctccccagcactgggatgacaagccaccaagcttggattttttttctttccccgcatagcatctgtattagttagggttttactgctgtgaacagacaccatgaccatggcaagtcttataaaaaaacaacatttacttggggctggcttacaggtgcagtacattaccatcaaggtgggagcatggcagcatccaggcaggcatggtgcaggaggagctgagagatctatgtcttcatccaaaggctgctagtggaagactgacttccaggcaactaggatgagagtcttaagcccacacccacagtgacacacctattccaatcaggccacacctccagatggtgccactccctggtcccagaatatacaaaccatcacagcgtctgaggaatagaagcaagatactcatgctttaaagcatggtttttgctggctgagccttttctcccgtgaacctttattccatcatgtaaaaccgagactcctatttcacttgtgtggcaagtcagtttccctcctgtgtctgccagctttctttaccataggcatatatgcataataggaaaatacaaatagaatactatgctaccatacaaggctatcacagcttgggcacacctatggtgcccaagtgctctgcacatgagctgtatgaggatgctgtgttctctatagttcttgtgttcttggaatccatggtttaaatggaggatgcggatgcacacactctgcctgtagaagtctctttgccagtgctaaaagttatcacatccaatcatgtctgttgcctgctggtgcaaatgtgtgtgtgtgtgtgtgtgtgtgtgtgtgtgtgtgtgtgtgtgtgtgtgttacagttaccaaccaagggccgaatgtacaccaggccgtcactctaacattgaactgtattcataatcctctttcttctttttatcatgagacaaggtctcactaaaatgcttaggctggcctcgaactcactgtgtagcccagactagctctgaatttgtgatcctccttattgagcctcttggtctaggctagcaggtggatttgtttctttaaactttgttttaaggatggatgcaaaaagttcaagtggggtaggaacgtttgaaaatgggaaactacgcctcattgagaaagtgtcatgagtttatacagccaacgggattttaaaacaaaaaacaaaaaacaaaaacaaaaacaaaattcaatagattatcaaggaaggtaggtactggaatgaatggctgtgagtaccatgccaaccagtggcagaaagtggagcagggcctcagcttctatcttttcccatcattcctaaaagagaggatacgtgggctctacccacagctagactaaaaccttgtttagtatagagtagtgaaagcaatttgagtatgatagtcagatagtgttatttttaatttatcaaaaattaaatcattgagtttcccagtcagatagcaacagacaatgattgctggtttctagtgtgagaatcgaccaattcaataaagttggagagaaaatgaagtgattccctcagcaggcaaagatgtgtcaacagtcacatttcattatccttatagagctagtgagattgcacccttgccagatggcaaactcataaactatgtgcctgctagttagaataaagctcaactgaaatatttcctgactctcctgcaggtggatctcatcaaattggggtatggcctttaggggccaacccatcacccctgcatgtggtcagaaagccttttggaaataaacaagtaggttaccggagagagtataaccaatacacacatgcggtggtacctcaacactaactgggaacttaaacatggattagagagggaaggacagatagtagggattggtggcatggctctctataggaagtggccatcatgggtctcaatgttaattaaaaacctttctgagtagtgttgacatgagaggcagatttctagtcataacctatgtgtgtagagaggaaaccatgacttgctggtcctggattcttttctaagaagaaagaaactagaagactttcagggttagtagagatctactctacccatgaatgtgtccactaatcgtttcttgaaataacatctctaaataatgttgattccatagagaccttgaaaatgttagaaacgtgtctttgaatgccaccagtgcggcacacgtccacagcaacatccagacactgacagaggaagctgagatgctggctgctgatgctcacaagacggcgaataagacagacttggtgagcaatatctggccttcactgcacatcttccttttctgtacaccatgggaggtttttctggaacaaaattcttaacctgtttgaacaagcctcaaggttcaaatgactctttcacgggggtcacctaagcccatcataaaacatagaaatttacattatcattctttagcagtaataaaattatagttatgaagtagcaatgaaaataattttatggttggggtcatcataacatgaagaactgtattaaagggtcccaacattaggaaggttgagaagctctgctctagaaagtttttgagcatacactcggtggctctaatatatatttttccacattcttttctggtgaaatccatctgtgatttgtttttgtttttgtttttgttttgttttgttttaacatatcatatggcccttagttcttaaataattttgagagtacaggtctcactatgctgtacagtatggtcttaaattcctcatttgcagtcaagtgagccctgacctggacttgtgggtagttagaaatgcattgtaccacgcattctacatttttggtcatttctacttctttgtgaagactaatgactactactaaaacaaggggaaatctccttttcctgagatgcggatgctcatgctgtcccaataatacttggcatctctttttgctcacagctgtgtaacgactgattcctctccttctacatgtaaaaaattctctgtgctcttcctctcagacagtgaccttggcctccggctctgaggttggctttcttacttggagcttggttgatgcccttttgatggggctgctctctctgggagggaagtccctgtgcctgaaccattctgtttttcagatctccgaatccctggcttctcgggggaaagcagtccttcagcgctcgtcccggtttctaaaggaaagtgtcagtaccaggaggaagcagcaaggtcagtttgtgtctggatgtatgggatgactgcccacacggtgacaactctgggagaacactctctttcttggagcaatttgaagcttcccgtgtctatctccttaacactgtaatttcatgcctctcaattgaacatcatgggattccgaatcgtgggatggtacggcttactcaaatatgtacgcttctctgtagtcaagccttctttatgaccagctcccagggatgacttgagtcagcattgccgtcagtcttcctggtgtgtgtggggtcatagagtacaggggctcctttttcccccaaacttccctgttcctgttgaaataagttatatctgatggcctctttgcatttttcacctggctagaactatgataggctctcactagaatgtcactggattaaatcataaatgacaaatctttttccataaacacctatgcagttcaaaagtttcagcacgcaattctctgagactgtaagagctatattaataggcataacgtaaaatggcaagactctgttctgtaagagaaaatgcgcaggcatggaattttcctaatgtataatatgtttctcacattgatgcagtttgtaagtgaaccctcttatagctccatgacttaagggctagactttccccgaagctgtccgaagcaagggttaggccagggcattgttttctttgtttctctgtgagtaagacagcttagaacctcccctgtcctttcaatgttagatcttcacaattattgctcactaactcacaagtgctgacaggcacaggtgtgagtttgcacaagtaaaggtccttctagcttattacactgtaaatttcttgccagttaaaattccatattctgatcatgcgctcagatcagaatactaaatgtggcttcatactgtgaacagaaactgtaaaaggtttggtccaactgtgtaaattaaaggaagctgggatgagtccagattcagggaagggaatagagaattgctgattggccagagtgacaggccaggggtcacgaagagccagagcaccatcaggacttgagcgccttgaagtggcaagttccagcatggttgaaactcaccatccgacagaggacagttcaattgtgtcttcttcttcttgcttttgtaaatttaggtatggcattcaggaacaagtaatagtgatacagacaatagccaaatagacaaaatgatctacaaaccaactcccccacccctgccatgtctgtgatgaacagtgctaagaattgctaggaaaactctcaaggatgaggtgtctgcaggaagctagatgtcctgtggatagctgacgtatggtaaagctgtgcctaagcagcgtcctagcaggctgatctgatatgaacccttcctttctccctcacgtaggcattacgatgaagctggatgagttgaaaaacttaacaagtcaatttcaggagagcatggataacattatgaagcaggccaacgactcccttgcgatgcttagagaaagccctggaggtaagcagagaggaggtttctggcctgcttaccttctcgctgagaaagcatctcacaggagcaggaggaagtcctgcctcgcggcttattggggactgtggctggagaactagatcaaggttgattaagcctcaacatggagagggatgcgatttagaggtgaaggtcataaaactatttaaagccagtgtataagtcaagtcatactcttaaaggtgctatgattatgcttttaaaagagaagtgacttttggccaacacttttaattgctgaatttcaagatggctttgacgcagcccagaagagagaggggccttccaaggaggccaagtgtagagaaaagagaatgttcttggccagctgtggagggagtgctagactcactcactgtgaacatggcaaattagagagttcttattgtgtgatcttcctctctcagatgaaggaacgctataaaatcggctcattgattgctaatattaatgatttggaaacacaggttctccacggctttaaatgagtcttgagtcacaaccccagtgaatagggctgttgagcgctatgcgcctgactccagacaacctgtggtgagtcaggactcaccgcactgctcttctatctggaactttcttttccccttctgagcactcacaggaaaatgacccttcatctactttagtaaaacacatcaacattccttatgcaaacttacagaaaagttaagacaaggtcaaaggactgcatgggagttttcacctttattgcctgggggtcttaccatgtagcccaggctagcatcaacctcatggtggtgttgttgtgcctaggctagtgtcaaccccatgatggtgttgtgcccgcttcctgattggaattgcaggcacatgccaccatgcctggcttgagagcgatacacttttatatggctttcatcaagaatggatattttgctgtgtgtactgaaacattctctgggcgtaacaacgccatgtagacatcctcaaccaagggttctcagatagcagaattattcttccccttgtggccgtgtcctctctgagctcttgtcccttatagcagccagtccaccttgtgactaaataccgctttgtcctcccgtggccactcttctcttgattgcaagcttaagttccagaaccttcttatccagacagtaagtgatgtggaggagaacatgtttccagaacatgagcaggacctagagaaagggctaaatagaggagtttggggctggagagatggttagaagtaccgttgcttagcctagagatgtgagttccatctctggacccacagagtggaagggggaaacctctcccaccagttgtcctctgacctccttaggtgtagcctatatggacacacatgcacacactaaataaataaaaatttacaactactgtcacctcatcatccccagaacatactaagggcatggccattaaccatggcctttgtagtcacattgtatagcttatatcatgttccagagaagtaagtatccaaatcattcattggtttttttttttaaaggggtggtagaacatgtgacatacagactcctctgacatgaaaaggcaagaagcctcgttttgtattcaacatatgtgttcctccataaagtgacacacataatttaggctttctcagtgccttcagcaggcgcacacttgcccattcctttatcgtaggtatgagagagaagggcaggaaagccagagagctggcggcagcagccaacgagagtgcggtgaagacactggaggatgtgctggctttgagcctgagggtcttcaatacatcagaggacctgtccagagtgaatgccacagtccaggagacaaacgaccttctgcataactccacgatgaccagtatgtctgtggtcctgctccctgttttgaaagcctgcagcttgctgattgggagagagctgggtacacaaggatgcacagttctagcctagagattcacatttgagaaggagaggggggcctcagggaatgcaagctgtccatgtgttcttcacatatctcagggtttgctcactctgttctatcttatcccatgtcgtagtaacgaacacacttccttttcactcgtttccacctaactcttgccaacccctgccccctcatctccgttagctctgttggctggaagaaaaatgaaagacatggaaatgcaagccaaccttttattggatcgattgaaacctttgaaaaccctggaggagaacctgagcagaaacctgtcggagatcaagctgctgatcagccgggcccggaaacaagtggcgtcggtgagtccggctggggggctccaaaggcttgggcccctgctcacaggtcctggagaagccagttagcacgatgctcggccaccccaactcccctgcaacttctacgggcgcagatctcataacccatgtcctcttaggttcgtctcgggacatttaaaccatgtttcttggaatcctactcacttgaagagtatttcaaagtttcttaggaaaagtgctctcctttctgggactcctagttaatgcctgactccacaactcagcctttgtgccaggaagacattaagtctagtggtaacacctggtaacgtttcttcattttactgattaacctctaatactggggatactctccagaacgggtaggatgggccttgtcctctgggactctgagaaaagaatgtctatccatacagatggcgtgcaagtctacattactacgtgtgtacagtaccagagaggtcaaagctggggaatcggtttttaactacccatggatcagttcactcatttcaaaccatagtaagactatccccaagagagttgccacagtatggggccctagagataaaaagagtgtaaccccctgatctcagcttggtctttctgaagccttttaggcaaggtaaagacactctgggctctcccttctagagccttcccttctagaagaggacttaggctcacgtgggctccagcttccctctctttcatagacaggccaagggaacatctgctaacgttgtagttctaaataccatggctaatacaaacttagaagagaagttaatagaaaaatctatacacaggtaattatgaagcagagcaatatatagtaaataaccgctcaatagctatttcttgagtgatatagtaaatctattacccctgcatttttattgaataaagatcattcaatgctccctgtcggccaggtggtaagaggccacagtaacaaggtatccaatcttaatgtgatgagaccgtttcctgtataaaagagcccagggagagccataaagggctggagagattgctcagctgttaaaagtacttactgttctgtggaagaccagagttaagaacccagcactcaggtagggtagctggtaactgcctgcaacccagctccaggtggtccgatgccctcttatggcctgtgggtactcctgcactgacatgcacacacacacacacacacacacacacacacacacacacacctccaaacccaaaattcaatgaagtaaaccttaacaaaacaaaaaccaagaaaacctaattttttttcatagtaacacacacctataatgccaggctgaggtaatgaagatcatgagtttcaattcaggctcatcctggtctacatagtgataccctgtctctaaataagcaaatagaacatagcctaattgaaaggactggatgtccagtatcgaaacgatttgcctaaataaaagaatctccatcctggtctgctgcctctctctgaagctcagagcattactagttctgcacagaggaaactcttcacagggcgagtgggctggcatctccgatgtcccggggagctgcccccatgtgtcattaagtcaccgggatgctgttttctccctgtcagatcaaagtcgccgtgtctgcagacagagactgcatccgcgcctatcagcctcagacttcatctaccaattacaacaccttgatcctgaacgtgaagacgcaggagcccgacaacctcctcttctacctcggcagcagcagcagtgtaagtgtttgggaattcaggcgtttcctctgcgggactccccactgatgaaagtgtagacatgactgtcctggattcgctaaattctatcagggaaaaaaaacctttgctacaattgtaatgttgaatgttgtagaaatatttaaatctcagcccaagatttctaccctgccttaagctatttaagtccctggatgaaagacacacacaacctttatatttacaataaaccctcaacaacacaagagctgggcagatacgactctctaagttgttagactctgtttcctatcggtaactcccaagttattactatgttgatctgggctgctcttatctccgattgggcagccctcagagccactttctcttgactcctaacccatggcagcttctctttcctcctctcctgcacttctcgtccttcatggtcccctttaacccccaagcccatgaaacctaaaccccacctatgtctcttttgctagaggctgttggcatctttatttaccaatcagaaataggttggggccatggtgtacatgcagactcatctctgggaccgccaggtcttgggaaacctgcttttagcaccacaatagagagcatgagaccaaacctcaatggttggtcgaatgttaaataaacgcaaaagtagctgcctggggtttggttagaccggtcagagggtgactgtttgcctacaagcctgagaatctgagctcaattcataggaaccacttaaacaaagcctgagcatcattgcctgcctttctgtatccagagctggacaggtagatgtaggcagatctctggagcttgtgggccagcctagcctaactaggtgagttccaggtcagtcaaaggccctgcttcaaaaggtagattgttgtcccatatatgccctggcaatgaaaacacgactcaattaatatgaatatatgctatgcgcctagattgaacagatctaccactacactaccatcttctccatctatgagaccccttagaaacttgcagtttctccaggccatgtgcttctgctctgcttttcttcttcttcctcctcttctgcgtcctctccctctttcattttctccttctccctctcttacttctgctccaccaaccctttcatctgcccaatcatcagctctcctttattttacaaattaaggtgggaagcaggtttacaggaaatcacctaagtgctgactcattccttgttcgcagccactcactggagaatggaattaatatcatatataattagccccagagctctccacaacaggagatagcacctaggatacctggggctgtcttctggcctccttgtgaacttgtggtgctaatatgcatactagtaaactcatagacactcataggaacatgcacatggtgaaaggcacaaggcagaaagtaacatttctgaccagtgtccccatctgccatctaattagtgtaccacgggtgcatcatgccttggtggactcagggcgattttcagatagccaggcatcactcaggttcttcctgccaaggcatggcctatggtccccagacgacaggcttcctagacaagactaccactcctttggctctatcagaagagactcaagccctgggaatgttatagaggagaagatgttaagatgcacaggtgtcttctgaggagacaaggagacaagctcactttgtagctcttaagtatgcattccacatccattggcgtcttctgaagcagaaacaagccagtaccttacctagccttgctggggacttggtgacaacccctttgagcttttcccaggagcttcataatagtgaatgatctatctgcaaaactaatgtcagggctgccctctgccacagggtctccatgccctccaaccccagggctgtggttactcatagacagaagagcacagaatttttgtgctgactgtgtaaatagcaatatgtaacttattccccttatcttttcacccagtctgactttctcgcagtggagatgcggcgggggaaggtcgcctttctctgggacctgggctccgggtccacaaggttggaattcccagaggtctccatcaataacaacagatggcacagcatctacataaccaggtagcagaggctgtccccagcatctctcttctgtcaattataccttaccatgtgtcagcaatgaatttaatagacaggcatggagtcattaggaaagttggattgtgaacaaacaatactggatttatattaactataggaataaatcatttaaattatagaacaaatatttttgtctggctgaaagcaagggtcaaaaattgtatattttagattacttttaatatttattttgtatgtatgagtatttgcctgcataagtgtgtatgcaccatgactatgcagtgccctcagccagatgagagcattggaccctcagggactgtactcacaggaggttgtgagccaccatgtgcaagaacagatagtattcttaaccacagagccatctctccaagcccctagattattttttcaaaaaatgttcttagaaagtccaagtgaccagccttgtaaaatggctccgtccacagaagagaggattttgtgaaagacatcagaaagggagatggaaaatgtattttgtgagttcaggcatttccacccactgcctaactcccaaacaaacctggaggcatatttatttatgaataaatgctgtggccataaactttagcttattccctgactagcttataacttacaaagccaatttaaactcttctgtgttttccacaagactaattactacctctcctccattttatgagtctgacttcctcagagtccggggcgaatctcccgcctctgactatgtcccagagttcccgttgctccctgcaggatgtcccacctcctagtcctacctcagctcattggccacaggggtttgattaacaagtgatgtttccatgcagtgcacaaaaccatcccccagtaatattgcctcaaaattcaaatactaagtcaagttgttcctattaaagcccttccaagaagtaaattcgtttaagcagtcttagcaggattttccttttccttttctgtaatatggtggggctttgttgatgatgttggcaatattggtattatattaaaaacagtgtcatgaagaaaggagtaattttttttttagacttggttggactcagtagtgactttcagtataagggagagatgtgatgacctgtctgtttcccgagagctgcttaccaggatttgggggagtaaagtagaggttgaatggctgagggcagaggcaaggcaggtgggtggacatttcaggggtgaccctggagaggtgggtgggctgtgtgtgacaggcaagcttatccatgatgtgatatgtgagtgtgtgtgtgtgtgtgtgtgtgtgtgtgtgtgtatgtgtgtgtgtatgaaattccttctgcaattatttctgacacaaggtttggaaacatggggtccctgagtgtaaaggaagcaagcgctgccgagaacccaccggtcaggacaagcaaatctcctggaccgtcgaaggttctggacataaacaattcaacgctgatgtttgttggagggctcggaggtcagatcaaggtaaagttcttgggcatcctgttcagaaggccatctgaacaggacccctggctgatatgtgctcagtgttaaatataccctgcacaaaatccaaaaattcttgcttttattagttttcatttcagcaggggatcagctgtttttgcaagggtaaacggtcatttttaattacgaagatgaagacaagagtaatcaatggtgctgtttgccacttagacaatcatttcttccagtgatgaagtaggaaattaaatacatctatagtcatttctgtaaagtccctttatctctcttccaattctagtggtaattgtgctaattagtgtatagcaagagggcatagtatttgcataatgacatcacctagttgaactgggttgggaggacagcctgcgtccctctagtctactgaccccttgtctgggctggcgactcactcacagcaaactttccccagaaacggagtggatccttaggggactgtccagagatggctgtggtcattcacacctttaatcccagcatccacgagcctgaagcaagcgaaccgggagtgtgaggctaacttgggctgtatccataaacaagcctctttctcaatccccttccccctcaaggaacagaaacaatgtaaaatgttcaggcttagaagtaattgttgcaaactggccatttcattgaatgttctcttggagtccgaagcactggatttgagctcccagggcagtttagagaatatatgcctgccttcaggcctatgggtgcgcagtatgagtttgtttgtttgtttgtttttttgtctttgtaccagaaatccccggctgtgaaggttactcattttaagggctgcatgggagaggccttcttgaatggcaaatcgattggcctgtggaattacatcgagagagaggggaagtgcaatggctgctttggaaggtagcccgccccacgtttctactttctcttagctctatactccctattctcataaaagactatgaatggactcttggttaccgaagcctttgggctaacactgggtttggagtccaactttcccagtcatctagcaaggcttccttggtgactttggctaattttcccctttccctgaagtttgggtgtctcccagacttctcgtactcaccccgcccttactcctcagggtcagtatgcagtgtgcatgtgcaaaacattataaatctgagtgaaactctgctccagtggtcatcactggtcttccaatgagtccacgtgagcatccgatgagtccacgtgagcatccgagggttgtttccctgacccttgttgcagggagacgcagggcttgcagttggcaagaacagcttttatatgcacagttagtacgtacagcttctgaactctgagacatccccttttgctcacaccgcatgtctaaccaaaaatattcccagaaacttagtaaatctgatatgaaaatagacccaacctctgggctctgctcctccacttaaccaagttaaatggcggatgctggttctccttcactgtggtaaggtcggcctttttgtgtacatccccggtttcattcccagagacacctgccatcctaccagatttccaacccttgcctttgaagcaaaggctgaggaagaagggttgggatgcccctgagctctgtgttcactgagggcctagtcatcccgtgttcattgagagtctaggcatcttgagttcactgagagtctaggcatcctgctgctgagctgaaatcccagctggctataggagcaggtggaatgattggtttagacaacctagggtttaataagtatgtttcactggacaccgaatgaagaaatctcccagccattcttatacttatgttgaccaatatattgaccaagtttcaaataaccctagcttggtaggttattaatacgtgttcttgaaaaagaaaaaaaaaagcaacagtagaggagctgtatttatcatacatgtttgaaaaatgtcaagttcaaatatcaaatatagctaggtatggtagcacatgcctttaatcccagcactcagcagataaaggcaggcagagctctgtgagttctagcctagcaagggttgcatagcgactgtttccatatatagagggaagatagataagtagatagatattgataaatagatataaatgatatagatatagatgatatagaaatagctgttgtgatgtagtcagagctttaagttagtttggaacatgctaatgatgcacagagtacccttacctcaccaatgggctacagctgtagtgtttccaaaatacactgaatctcaagccctttataaaaatgggatcattaggagttccttcatataggacatattttggccagaatgctactttgtgtctgagcttgtaaagtgactatcttcattttagccatgcccatacacacacacacacacacacacacacacacacacacactaacacacacgcagcctattggagcagcctgaagggacacagtgcgctcctacctggtgtcactggctagtgttaggttgtcggtacagcccgtaatactcctcagcttactgattatatttggtttatattgcctagtagacgggttaattccttaatccgtctttttatgtgttgctagatactcttacataatatcagcatttttataattctacttaccgtaatggctgcttgcacaaactctcttagaaagcggctgggctctggtcaacatgggtttgccctgcatgaaaatgccttgtgggatacagcttaaatgtcgtctcctctcctctctgacacatttgggactgggggtggggtgggattttacatttgtattttgggatttgggggtaatggaccatcctggaggtaggattcaaatctagacgcagactcttttttttttttttttttttttttgctttttatcatatataccaaatgcagagcctgagattattccatatattttaaaacatctttttttcatgatgcatatataatttttgccttgtatcatcctgtctgtctgttcagagctgttccaatttcagaatacttaagttttcacaagttcgaggctgcaactttatggctcactatcaagaacggagataggtttctcctacggcctaggatgagagagtacctttgctgctctgcccgccctcctgatcgtgggtggtatttcatggcttctgccttgcagctcccagaacgaagattcctccttccatttcgatggaagcgggtacgccatggtggagaagacgctccggcccaccgtgacgcagatagtaattctcttcagcaccttctccccgaatggccttcttttctacctggcttcaaacggcaccgtgagtttctgcagcacttggccctccgtgtataggaccgttaccttaaggttacctatgtctgctgtgcatttctcttgccagaggcgaacagatgtccctccactacagaaagcacacccacagagcagagtgttgcttccaccacagcgtgctaggagagacaatgaggtttcacttacattcacttacaggtagtgggggtccacttacaggagaatgaaggaggagttagtaacaggagaatggtccccaagaccaatgcaggaccgagaagtctcttcctagcatgggtaatacctccaaaccctgctccacgtcagtccctgtcagtcagtttcgctcttcataaagacctaagtccacaggagctgggagcgtcacctactggagggagcaaaccacagaagcaagtggttggctggagtcttccgtgagcgtttgcatactcgctgatgaacatcaccaacctgattctgttaaagtctctgaggcggtttcaacaagctcttactactgtaatccatacacttaggctgcctaggttctcatttaagtcgctgatcaatgagcacaaattcaggaagaactatcagggaacacacgaaagcagagtagaccctccagtcggcccaggcgtgagtcagacacttcctgttatgctctagttgtataaatactgtgcatttgcttttttaaaaattatttttattattattttgtgtatgtgagtagtttccctgtctgcatgtctatgcaccataagcatgcttagtgcccactgaggccagaagagggttttggatctcctgggactgcagttacagatggttgtgagctgccaggcaggtgctgggaattgaacacagatcctgtgtaagagcagccagtgcccttaaccactaagccatctctccagcccccacagtagcctcatttgaatctcatctacaggaatggtcccccttttgtcttgtattctggccattttcagaaacagctactaataaatttaaataaaaagccctcctagacagtccaattttcctactaacacctggctttggtaacaatgtatatcaattagtttaattctcagtaatattccacaaagccgctgggtacatttttacttatatgtaacagactagctatttgactctaacttttatgtaacaatccctagtttgactttaagagttttctcccatccctaacttgggagggaaaaaaaatctagagataaagacgtatctgcagagaagacttctttcctccacagaaggacttcctatccatcgagctggtccgtggcagggtcaaagtgatggtggacctagggtcaggacccctcactcttatgacagacaggcggtataacaacggaacctggtataaaatcgccttccagcggaaccggaagcaaggtaggtgcacaaggtggacttctatggtattggccgcccctctaagaacaaacagcactccagaacccgtggtgattctgctcagttggccgcccgctgcatcttcatgacattagaacacgtcaccctccacactcggccacagctgcactcttgcatgatatttgattgaaagctacctttgtctatggaacgagaagcaatggggatccgcctattgctggaagaatggtataattccatttgtccagggtttcggtctttcttgttaaacgcaggattggaaagaaatatcggattcattccgttttctttcacacactgttcggcagcgcatgttctgtggctgccaacctttgtctctgaatgacaatgagcaacatcagtcacatttgcaggatttaaaagagcatgccctcataaatgggatgtgttgacagaggtttatgaagtgttaaccgtccctttccccgactcccactaggactgctagctgtcttcgatgcatatgacaccagtgacaaggagacaaagcaaggagagactccaggagccgcttccgacctcaatcggctggagaaagacctgatttacgtgggtggattgcctcattctaaggctgtgaggtatgatgtgaaaccacggggcagtcgtgtggaattcccaggcctctccgactcagtgtgtgaatggtcctcatgtccttacctccaggaaaggggtcagcagcagaagctatgtgggctgtatcaagaacctagagatatccaggtccacctttgatttgctgagaaattcctacggagtgagaaaaggctgcgcactggaggtggggagcaagcttggtcacgggggtctggatgggtttccctaggtatctggtggtttaccgcaataaagctctcagcctgagggtgggcgagatgcaaaggaggcaggccaacctcaccctgccttcccctctctgtcaccagcctatccagagtgtgagtttcctgagaggcggctatgtggagatgccacccaagtctctctcacctgagtcatccctgctggccacattcgccaccaagaacagcagcggaatcctcctggttgccctgggcaaggatgcggaggaggctggtggggctcaggcacatgtggtaagtagctgcaacccacggaagtagagcggggctggagacgtgtgtggggaatttctacctcacgcatttactgtaaagctgcttacaagcggttctataggagcgcctttttaattagtgagtgaaagtcatgactgccaaaggttctgctcatggactcaaggtttcccgagtcacatgatcaatatcccacttctcagggtggatgacaggctgctgccctcagactaaagcagctcctcagggggaggctgggtttccctcaatgtgcaatgcttggggcagagtgagagttcttcccttacattctatggggggggggggagttgttgttgttgagtgtgaagggagaagagagacagacgtggcctgtgacaggtgcccagtggcaggagaaagcagagaagacattttccccacaagagggtgccatgcaatcagataactgaagggaaggttggagaacactagcctgaggtcttgatgaaggagagactgcacacatgcaggtcacagaacaacatgctctgccgatcaagacatggctgtgtgataccatcatgcacactgcatggtggatactgcttcctaaattgtatggggccaaaaaggttcagagaacctgattaaactgtccaagtatctatactgaaaaaaaaaatcagtctcctgcatcatgtagtttcatcagtaacagcatgcatggggatcggcagaaatagaaatctgtgacgggaccacaaggccaacaacagcaggctacaagtgacacagatcggagtggagtccatcaaatccaaaaataccctaactgatggtgactttcctaagcactcgattgccttgcattatcgggtctacatcattcatacaagacggaaaatgttacctacccttcagtaatgtgttgtgttttggaaaatgtatcctttcagcccttcttttccatcatgctgcttgagggacgaattgaagtgcatgtcaactctggggacgggaccagtctgaggaaggccctcctgcatgcccccaccggctcctacagtgatggacaggaacactccatctccctggttaggaatcggaggtacttagctccagggccttgccgagatgagcttgaggaagctccttagcttgtcggacactcagtgtgattgacacctggtgattgacactcggtatgactgacacttggtatggttgacaccccatgtgactgacacccagtgtgactggaatggttggcatggaaggcattgacagtcatagttcttaccatttcaaatgccggcactctaccacagagtcaactctcttgtagtttgtagcgatgtgtttgtgaaattttcatagttgagagccatacctttgccctctatttaagccctatatgaactacttacaaactgggtgaatgtggtggtgaacagcaggctggctttggtgggcagtattgtgcccacagtaaacaccgtcctatcaatgttccctgtatttccatatccaactgtagaccttctgtttgagggatgctgggtgttttcacaacagaaaaaaaaaaaaaacatgtttgagtacacacccttatctcttatactcaatcgagcttagtgatgtattcgtaggttttactctttgatatttgatgttgagcttcaggttcccatgttttggattcacatacaatccatgccaaaatttttctgtaggaaaaaattatcatcccaaaaggaacttgctagaattacatatgaaaatggagctcttctttgtacttaaaaaaaaaaacaacaacttgttttctcctttgatgtggtagagttatcaccatacaagtggatgagaacagtcccgtagaaatgaagttgggtccattaacagaaggaaagacgatcgacatatccaacctgtacatagggggacttccggaggacaaggcgaccccgatgctcaagatgcggacttcgttccatgggtgtattaaaaacgtggtccttgacgctcagtgagtgtgactgtttcccatcctgttcttgcgctttgtcatctgccaatggtgggagatgttctccaggctcagccattataagggaacttccttggcctatcatgactggctctcccaatggatcttttatggtcaacatggcaatcagatctgaccatcaaatagtatttagaaaaaaaaccatcactggctacctttgtgtgtgtagtgtagagtactgagctgggctttgatgcatggtgggcagttactctacccccgaggtacatccccatccttaagtgtacctttacaagaacccaactggattgctaacagctacatcttcttcatggtttctcccgagacagttgctatatggttaaattttgcacgtttccactctctgtgaagaagagaattattatgtgcacagatgttgcttgttcctcctttcccaagctctagtcacattggagtcgtggggaaagtggtgtcagaacctagcgaccagcatctgcctacaggaaatcataacgtggtcagtaggaggagttattgattccatccttgctaggctgctggaggcacttcctgaggacaaggggacttccgatgctccggatgtaacctcgagagatggcaggggtctttcacagtcacagtgacctctgagaagttaccttctcggagtccctgaacagagcaagaggagacctgtggttgcacagactctggtgcaagagcagaaccttactcagatatctgtagatttatatacagtcaccagttgcccatccatccctctactgatgaggcaacttcatgctcctaaaagccacgaggctttggaatgcatagtcaggtatagctttggtagtcgggtatagctttgggaggtgccagtgaggtccaggctgctgtgggattgtggccagagcttcttggtagagagaccagagacaagcacagttcagaacaaagaaccagtattaaatggaaactgctgcccagtggggtggggaaccagagactcgatgacctgagagcccagcctacagcggtgacagtcttgactctggtctaagctcaggaccatccaggttgccagcatcatccaggtttaggggtaccagcatcttccaggtttaggggtgtatgcttattttaatcagaaccaaacagaaagagtggtgtgcccatgtaacttgggcaccgtgaaggatggttggcttggttaccctaagagaaatggatcagtggtttaaaatgggttctaattaccactttaatcaaatgattaggtccccacgctcctccagggccttttcattacagtgctctctcgtttgtctgtagacttttggacttcacccatgcgactggctctgagcaagtagagctggacacatgcttgctggcagaagagcccatgcagagtctgcacagagaacacggggaactccctccggagcccccaactctaccacagcctgtaagcatggcatcccttcagtgggggtcatccaggtctggtcaggagaaagccactggctaggaggagtgaacccaggcagacagattccgagaaagccaaaagtgatccaggaagcaatgggaacgcaggagtcaggacagctgggggagagcatacggaaagagcacacggaaagagtcccaagagggcactggagctgggaaggaggggaaagtacgccagctgtgccctctccctgcctcccagttcctcagctgtccctcccatgggcagactacctgagagtcatttgtctctctggggactgagaagtgactttaaggatctgatcaaccactggagggatagggtggaagctcttgtctgtggatgactcagagttggcaccccaagtggttagtgtaccatgagagttttgatggtttccctaatgcccctgtaatgtgtcagatttaggtgggggaagcgtggaaggaagcatgtccccgagtccctgggtgtgattcagtgttcaagtacgggagtttggtccattgagggaaatctggtcacggcactttattttctccccttccgacttctcagaagatggtgtgtagttattccagtgcagcactgtctctgctgggccccggagttcaagcctgtttcctagttgtaaacccacatagcagactcggcatcctgtgtgagacgatgtggaggcagccaacactgccaaaggccctgccctgtgctcctggcttctggctagggtcctgggcccttcaagcccagtttttatttccatttcctgtacctattatgtgaattgaagggcctgtgagatctgagggcactgttgtctccctgtggtgtcccagctgtggctgccttttagccaccagtgtcctcgggccatcctcatgatcccttaggcccaaggaagtctcatagaggaacccccatctatcatccgagggaaggtgagctggagtaatggtgagaaatggcaggaagctgagattgttctttggggagaaaggcactgaggggttcatagtttaggatagagatccagacgagtcaaaccacagtggtggcagctgctgttccatcacggtggcttctggaacatttcctttatggaagaacatggtagaggtcctggctaccctggctcagggtccctatgcacctcttacaggaactgtgcgcagtagacacggctccggggtatgtggcaggtgctcaccagtttggcctctcgcagaacagccacttggtgctccctctgaatcagtctgatgtccggaagaggtaagccattttcctcaggtcactctgaggttctccttaccagacgatgaggaaagcatggtgctagcttctgaaataagtatatccgctcatatccaacagattcagtggtccacacggacccagacaaggatgccctgtatcccaggcccctaatgatagcatactctgcattgccctaaaacaactgaaggctttcctggtgacctgcatgggagtcttgctcgtttttgtcattcagagctcagctaaaatgtcatagttgttcactttaattacttagtacagtgacccgtgggcctctctgggatgtagcagtgatatggttctagcctcggtttcaaggtttcaggaattccttctcatttttaccatcttagaaagttcccatcagccatctgtgccatgaatgggagcgtgagtgagtgaacacctcctctctctggagactgtgaggctggtgtacgataaagcagcagtgggttctctctctcgtggaggtcaccttaagcactggaagctgaccttcccggtcaccggtgttgagtccctgtcctccctcaggctccaggtgcagctgagcattcggacatttgcctccagtggcctcatttactatgtggctcatcagaaccaaatggactacgccacgctccagctccaagagggccgcctgcacttcatgtttgatctcggcaagggccggaccaaggtctcccaccctgccctgctcagtgatggcaagtggcacacagtaagttccccggaggccctgtcacctgtcccaaactctctccctgcatctgtggtggtaattccattttcttgatgggaatctgtgccttttggcccttcattgtcgctaggtttgacatctcccacaaatggtgtacgcatcgtctcagcagggccccattctactccctgaatttctccagacacttgttcagtgttgaacacccaataaacatccaactgctggcgagagaacgaatcagaggtctcaaatcctgttcttgacttggcaagaagccagagtcttagggtttcatttctgtgaaaagacaccatgactgccgatggcaacttgtccaaagaaaccgtttaattgagtctggtttagagtttcagaggtttagtccattatcagcctcaaagcaggaagcattggcactttgtaggcagacatggtgctgaagaaggagctgagagttctacatcttgatgcacaggcagcaggggtaagactgtcacactagacctagcttgagcatatgagtcctcaaagcccacctccacagtaacacacttcccctaagaaggacacgccccctccaagaaggacacacctcctccaaggaggacacacctcctccaaggaggacacacctcctaatagggctactccctatttaaacacatgagtttatgggggacatccctcttcaaaccaccccaaccagtgacctgaaagaactgtgctgctcatcgaagcgcctgctgataaccagggctcggaagctctgcggtagagtctccccatctcctaccagcctcaatctagtctttgccacagcaggccacgggcagagccatccgccagggtttggtctgagctctcaccgatcttaaggaacacacgtccctaagcagacttccgttaaagctttctcgcatgatttgcaaattctgggtgttttcatttcccgtaggtcaagacagaatacattaaaaggaaggcgttcatgactgttgacggccaagagtcccccagtgtgactgtggtgggcaatgcaaccacgctggatgtggaaaggaaactgtacctcggaggccttcccagccactacagggccaggaacatcgggactgtaagcagaggcttgtgggttggtggaggaccattatgttccagtgctcttgttcccctgccccaatcgacttggggggaagcccagcaaatctgtatgtgcacattagtgagagaagctctttaaatgcaagcagtgttttagcaagaaatgaagaaaacacttccagggcattatcactaaaggaccggattgagagagcaaagggggtggggggtgttcacatgaggaattgccactgttaaactttagaaagcaagacgctgtcataatgtgtgctattgagggaggcttaatgaagcacaagaaaactacattctatctcatcatcagctccacctactctcttgtctccattgctttagatcacccacagcatccctgcctgcattggggaaatcatggttaatggccaacagctggataaagacaggcccttgtctgcctctgctgtggacaggtgctatgtcgtggctcaggaaggaactttctttgaaggaagcggatatgcagctcttggtatgtgctgttagctgcctgaaggaactccttgggtttagtgtgttctctgaaatgatgtggatccatctctgataggatgagaccccgctagagaggctgcctaaggccatgtttgtttacttggtgttctggtctgtgcctaactgttcatgcaaagcctgcaccaaaaagggcacattccctgtctaggttaataaagacccttgaattgaaaggcaggcatgcacgcctgttattccaatgctcggaaggctgaggcaggaggatcccaaattgtatatcaatctgaatgataataatgatagcatgtctttaaaaataagaacacgaaatactaagaagaatcagggctctggtaggagacgaggtagggagcccgaatgcaatgcgctgatcagattgtcttttagccccagccatggtaacaactgctctctagtgccaatattcatccaacggtcatgatgccctccaagatacacattaattaagaaggctaacagggagagactatcaagctggatgtatctagggcccaagggatcagatgcaggtgaaggaagtccctgaccaccctctgttctggttcatgaccgagtaacttcttcaaaggcggtctttttatctgggcttgttcatgcacgcctgcaatttcagcactcaggtggcagaggcaggaggattgcaaagctggtggcggtctggtgacatagcaaggttctatcttagaagaaaaacaaaaactaagtgtttcttcttatgagcactgaagtctgagggatgggtggggatacagctgacccagatcttgaacttggccagaaccatgaaggcttgcccagcccagcactgtccagcctgtgggttctcaccataacagtgctaccttgtgtttttcagtcaaggaaggttacaaagttcgattggatttaaatatcacactggagttccgtactacctctaagaatggcgtcctcctgggaatcagcagtgccaaagtggatgccattggcctagagattgtagatggcaaggtaggtggtccacctgcaagccctgcctaccctaccagaggcagagcagaaattgcttagattcaagtttcttattatccacttcattaatggaaaaaagagaattttccattagtattttaaaataaggcctaaaaagctatgttcagagtaacttcttttcatacatttgagttaatatagcatttctgactgcactttaccagaagcaatatgcccgtattatgccctgtctcttctaataagttttaactattcacttgcaaataagcagagtcccatagatttgcagtgaaatgaacacgcatgtccccacccccaggcttctcataatcaggtcaggcttagcccacactgaatccccaagggacagtgtcacaacccccaggaagccataagatggactacgtgtgcacccacctatgtgcatagcttgtgatatgcaaatgaaaccatcactgccatcaagatccatagcaaccatggcattaccactagactcttcccgaggtgctccttggtaaccacaggccccagaccctgccttccttgcccttggcaaccattgatctgcctctactgccttgcgggagagaattgggcgtgtatgctatgctacccttaagccacagaaaccatggatgctggagtcttggggtgccctctcctgcaatatgcttggccaccatgagtgagatgctggaatcttccttttggaaggcaagggatatggtccctctcggattcacatgctaaagtgctccccactagcatctctcagagtctggtgtttaaagaggccattgggagctagtgagatggctttctgagcataaatgcctgcctgatgttaatattaatgacatcagttcagtctccaggacccacagggacagaaggaaagaaaaaacaaaaaaacaaaaaccaattccagcattgacttctgtgtgctcagacatgggcacatgcacaagcccacacaataaatatgtgtgaatcaaaagtaactcagttaaaacgagatcattaagtgggctctgagccagtgtgactgtgaccagcaggacacacacacacaggagaccaggcacagagaaggctccttgcatgctccatgcattcatttacttgcttggattgcgtatttttccttttcggttcttggccctttaggattgcctatggtggggtcaggggagactggcaaaattccccttgccttgtccttcacctctcctcttcccgcctcaattaaaaaacaaaaaacaaaaaacaaacaaacaaataaaaccctaccttcatgacagattgctgcctcaatgctgtggtgtagagccaacttttcttctcatcctatacttaaatataattttttataaatttatatattttttgaaaacctaacatctatttacaagtttttgcatgatatctaaaaagaaaaaaattatcagaagtgtaaaagctatgaaaaatgtaattttctgttgttctctgtattttactttttttgttttgttgttgtgttctatatattacttcttactctcttgcaactttatttagtgttctttccaaagctctgcaatatacatctttagtgtgtcacacacacagtgtgctctgaaatagtagtggtcttgtaggtatctggtccaaaagaaacttggggcaaatgctaaccatggtgcctactggtgtaccaaaacacacattggcgcccatactcactcagtacctgtggctcccctcagctcttctcagcccactactatcctaaacttctccagcccttgggctttgcttcctccagcttctggttcctatatgactctgtcattatggccctgtgtccacactctctctccccagtttggtctactggtcatatttagtctatgctttctctgcccactctggactctcccagatgcctccggctatactcttcccatcagccataccttggagctatgttctcagctttccacagtaggcagtgtgggaaacttagaacagcaggcttgaaactctcacctccctcagttatcagaaccacataatggtggagctttaaacccaaaacttgacttgcccagctctggaggctagaagtgtaaggcttggcagggttggcctctcctgaggccccgctccttggcctgtacatggctatcttctcctcacattgacttttctctgggtgcctgtgccctgatgactctgataagcacacagattaaagttcaccatagtgacctccttttaacctaacaacctccttaaggtccccattatctgaatatcatcatattctgacagatgttaggggttagacctcaagtgtgtggacagcttttggagtgacaccatttagcccagaacccctctctgccctttgcaaagccctggctttttgttcatggctccctgttgtggagcatctgtgcctggtcagggaagttagcaagtgattgtgattggacagtccagtttctggggaaactgcagactcctgaaaatgtcctgaagtgccctgagaatggagcactgattttggaactgtggggggctggatggagtcccagtgttttaggaggtgatcctccactgtcgttgtttgtcacggtcattgctccttgtttccagaatcctatgtagtcctctgctctgagaacaattcatgaatgtgctgtgctccatggcttcttggccttctggctgagatccagtggggggggggggggaaaggcagtggtcctaaatgtagagaactcacccaggcatttgcatcgtccaggtcttatttcacgtcaacaacggtgccggaaggataacagccacctaccagcccagagccgccagagctctctgtgatggcaagtggcacacactccaagcccacaaaagcaagcaccgcatcgtcctgactgtggacgggaattccgttagggctgaaagcccccacacccattccacctcggcagacaccaacgatcccatttatgtgggtggctatcctggtatgtgtgactccctattcggtttatccacaccggaggctcagtcctgtgaaggtgtaaatgcaaaggatcatggggtagggattgaaggatgcataatttaatgacaagtcccactgttttagacaagtggtttgaagtactggacctaaacttttttggggaaatttagcataacccccatcacgtacaagtttctcactgagaacgttggctctgccgtgacataactggataatctcacctctgccctagatgacctcaaggctggagtctaagtcaggcataggctggactcatcctcctgtatcaaatttgcatttgaaatgtcccaagaaattattgcagagcctcaacacctgcttggtgacttttcaagtcccaactaagccctcaagtcactgcctaaaaaaatttagcaggaattctgctatccactaaacccacatgtgttatgatttgagagtcgtttgaggtcatttttgtctcttttaatataccctatctcaacaaaattaagcaacccttgtccctttctccctgaacagcccacatcaaacagaactgcctgagcagccgggcctcattccggggctgtgtgaggaacctcaggctgagcaggggctcacaagtgcagtccttggacctgagccgagcctttgacctacaaggagtcttccctcattcctgccccgggcctgagccctaaactgtcgccagcctctgcccttggaatcatcgccaacgcatggaagagagcagtttgtgaactcaagcagctcagctcccattcccatcccattgccatctcaggttatgtttccagaggaaaatgctgtatttatgttgaactaaagccacacggacaacagatacctctattaaatggtttaaaacgtcagtgg

SEQ ID NO: 86 - DNA, 178519 bp, Pan troglodytes
  variation 37416..37702: note = n is a, c, g, or t
  variation 38146..38213: note = n is a, c, g, or t
  variation 59629..59630: note = n is a, c, g, or t
  variation 59635: note = n is a, c, g, or t
  variation 97170..97753: note = n is a, c, g, or t
  variation 103530..103790: note = n is a, c, g, or t
  variation 108794..108995: note = n is a, c, g, or t
  variation 111337..111346: note = n is a, c, g, or t
  source 1..178519: mol_type = genomic DNA
tccaggagcggcggggccagggcatcgcggactcgagtcccgcggagcgttccaggcgggcgcgcggctttctccccagacccaccgagtggcggcggaggcgagatgcgcgggggcgtgctcctggtcttgctgctgtgtgtcgccgcgcagtgccggcagaaaggtgagcccggcccgggtcctagggtccctgtcccctgcaggcgggcaggcgggggcggccgcggacaaagcccgtcgcgttggggctgctggagtccgggcgcgcatcctgatccacctcggagtgggtgtctcggccacgtgggtctcccgcgcttgccggggagggctggatggggacgccgctcctggcggacgctgcccgctctttgcaggcttaggctttaacctcctcgggctttgggggtcgtccagcctcgcctctggcttttgcgggacttcgcgacccaggagcgccatctacgcgagcagtgctgggggtggcgggagcggggcgcccggagcggggcgccgggggttgcttttagtgccccggctgcgcgggcgggggtggcggggctgttggccgggcgcgggggatgaatggagaaagagctctcccgagtcgccctcattgtccggctgcgcaagctgggtcgccgcggccgggaaagggcggattcctcggggcccctggcagccaagcgggctagtggggagagacgcggcgagaagggcgcccctagccagccgtcccgggcagggggacccgcaggcggcgtccagggcactgatgcgccttcccgacccgcgctttttgtgcggtaggcgaagtggccaaacccgctcattcacgggattgaccgtgggcgcgccggggcgagggaccagcggagaagggagcaccttgcatgcgcgttgcaaggattgagaagagaaactcagagcgaattttcattttctgtttttgcgggcgggcggagagagagagagagagaagaaagaaagagagagagagaaagagaaaagaaagaaagagagagaaagaaagaaaaagaaagaaagaattcttttcccttttgggggacaaccctagtcacccacgccacccctagagctgtcttcgcagcgtggcttcgtgttggctaggcagtcacaaatatttgttgaaaacatcttaatgtatgcagcacatgacaatgggcgtattcccacgaatacaaacttcattaaaaaaaaaaattcgagtcaaaagtagtgggcggaatttgcagtgccctcgtgggaaacgtgtgtttgggcattgtgctgagttgtgagctctgcagaaacgcgaccatctcattcattcaagcattcatgatggaagcactggaccggagctggaaacgcagcattgaatagctgcgagtctgctgcgcagagccaggctgggaagagggaatttacatagttatcagccagaagaaaggagcctttggagagggagaggagccttaaaggattgcgaggggactcctgtctatcaggctgctgaaggtgaacaagtcccggtttcccacagggtagagaaagagcagcttgcctcagcttattgttccccgaaattgaaagtcttagactgaagagatggcctgaaggttgtcctggcccctcggggctcggcacttggcctggcggttatgagtggtttttggagaaagtgggacctcatggggctttcctgctttgagatgctgcggaaaacctcccagggcaggagccctttaatgtttcatatcgcattccctgtttgcctttttgccttccgcaccccaccaaccctcacccttcctaactagcctccttgagcagttttgattttttttttttttttttttttttttgcagtctccgggctgcaggcaggagtggagtggcgccatctcggctcactgcaacctccgcctcccgggttcaaacaattctgcctcagcctcccgagtagctgggactacaggcgcgtgccaccacgcccggctatttttttttttttttttttttttttgtatttttagtggagacagggtttcaccatattggccagggtggtctcaaactcctgacctcgtgatcagcccgcctcggcctcccaaagtgctgggattgcaggcgtgagccgccgcgcccggactgattttttttttttaagaaacgattttgtgccccatgaatagcatgaatgattaataaagtgtgtgttttggtgataatacaataatcctgacctgcaaatcacctgctagttagttgtctggtgttatttttaaaaataacttattatctattgacattcagattgttagacgttccctgtcatttctgcagtctctctgggttaccttacagctcatagtatatgacccgatggctcactttcctttgaaatataatgagtttcaagtgagctcctcctaagtattgaataggaggtattgtgtttgtaaaaataatgtgttaaattcatagctggcaatcacataaaattatgattgcttcatcacttttgttggaaaccatcccttctttttttctaaaatagacaattctaaggacagaaaaaaatctacgagtaaaagaaaattcacttcattctcatatatgacatagtattcaaatttagcaagtatgtgctccacagtaaagtatgcatgcctgaatggatttcagaggtgcgtttttcttttctgtcgctgtattctctaagggcccatgaaaaatattgattgtagcagttggaaacaagggtatgtgtaatagaagcctcactgcccacctcctacatagcctagactttagtccattctttttttccttcttcttttccagacattaaatatgaagcctacatctgtagttaatctagcgtgattgagaattcaaatgcatcaagaatattagaataaatacatatactgatcttcagtgtcttgtgccactgctttataattgcactgctttataaactcatataaaatgtttctgggaccatttatttcagggtaatgatccttgaaacgccctaccgttttatactaattcattcataaaatcctatggatattcattttcgtgtacagtaaattgttatggggaaataacacaagctctatctttaagcttcaggtgtttaattctctggctttactagctatggcaaattggggacataacgtgtattttagtttcactatctgtaaaatgggaataataatagtgcctacctgaaagggatgttaatgattaaatgaaataatgtgagaaaagttgttagaccagtatctagtacagagttaaccctcaacaagcaagtttatttatgttcatcactgttactattttataaagaactatatatttttaaactatattctccaaaatgcataattgtttagaaatttgaagtctggatttggaatcaaatagtcttgggctcaaatgccagacctgtcactttaattagctatggccatggctaagtttcttaacttctctgaatgtcagctttctatctataaaatggatagcattgatacgattaaataatatgtgaaaaatattagcacagtgtagggcatgtcataggtactgagtgcatgatggttattactgttacgcctattgtacttgctcatcatcctggacatcatctctctttcattgctgaaatccatttggtcattgagacttattgattttacctcctgaaaatctgtgcagtctctttcccgtttttttttttttttttttttttctttttttttttttttgagacagagtctcgctctgtcgcccaggctggagtgcagtggcgcgatcttggctcactgcaagctccacctcccaggttcatgccattctcctgcctcagcctcccaagtagctggggctacaggtgcccgccaccacgcccggctaattttttgtattctttagtagagacggggtttcaccgtgttagccaggatggtgtcgatctcatgacctggtgatccacccacctcggcctcccaaagtgttgggattacaggagtgagccactgcacccggcctctttcccattttttattctcactgctggctagacttaggaattgtttgtttttctcaggttgtttgtttttctcaggaaatagtgtgatggttcactcagcaggccagcagcctcacctgttctccctcctcagcagtgccatcactgtgatgtttctagaaacaccatctcgataaccgctcctactcttgtttaaaattcttcccatttctcaccgtttctttatcaaattacttaatgttccccagtgtgacttactttccttcatgtttaagcaagtggtcttcttccaaggtgtgcccttttcactccacatccttctccagggcccaccgtataagtttagattatgtgccccaaacccctcactttataagatgcacaaaatgacagtgtcctgctgtgtcacattgagggtaaagcaaggaggctgggaccccagctggcctactgtctcagagctgagaggcataatctgggatacgtctgcacctatttgtagctaactaatgtttcctggcacatgggctcttaagtgccagacacatctttcatttgggttctaaagaaccctggaaaatcttcccagctctctctctgctgaagtatttgttagacaaccttccctgtactcatagggctttccctgctcaatgctattgtcttgcctgtcatggggccaatgacttatctggctcaccttctctctcggccttgtcaaggtcagggactgttttatgcatatctgttcattgctttgcagtgtttctagcagttagtagccacttcttgttgttgagctaagttgaaatgaacatctttatttaggaatcaagtaactttaaaaatattttgaatagctgggcgcagtggctcacgcctgtaatcccagcactttgggaggccgaggcaggtgggtcacatgaggtcgggagttcaagaccagactgaccaacatggagaaaccccatctctaccaaaaatacaaaattagccaggcgtggtggtgggcgcctgtaatcccagctactcaggaggctgaggcaggagaactgcttgaaccctggaggcggaagttgtggtgagccgagatcgtgccattgcattccagcctgggcaacaagagtgaaactctgtcacacacaaaaaaatgtgtgtgtgtatatatatatatatatatgtgtgtgtatatatatatatatgtatatatatgtatatatatataaaatacatatatgtgtgtatatatatataaaatacatatatgtgtgtgtatatatatattttaatagataatccacatttatggtatgaaatgcaaaaggtactataggtagaaaaaagttaagacttggcttttttactctcttttgaggtaaccactggctttagttttttgggtaagcgtctaaagatgtttcttcaggtaacttttaaaagcaagctacatcataaaatctacttcttccctattagtgtaagagggacaccagtgattttctgacaaaacctggatgcatggaacagtatccctctgtccactgccctcccctcatactaacttctttactggaccttgtgcaggatattaacacatcacttagtaaatgtatgtacttgcaaacttttcaccttgcaacttgtccttccaagtagggctttgacagaaaggtatttttagagcagtgtttcctagatcttttggggtttaaaaacttgattgatttcatggcattgtactacttctaaaagtattgtttactatagtattaataagctatttttaagccatagagaattttaaaaaatatattttagaattttaagatttatgatatagagaagttgagtttgagaacaattctattacacgttaaggataagttaatgtattgaccaataagcatgacttattactggaacactatggcaggtacagaaaatatgtatttaaaaaaatttctaatgaagaagttaagtctacaccttgaatacagaaattaattgatagcgactggacagaactctggaactcagaccttagcggaagtttttcgttacattcttcagaaatatttggattaactagataaactatcgtctcctaagaatgatgtatgtagttacttacaagtttgccaataattcttttacttgttttatttctaaaatatcaatatgcatccatggacaattgaataaaccaaggcattgcaaaattaacgaggagaaaaaacacttcatagaagtaatttagttaaggtcatgaactttggttctgttggaacacgtctgtcagggagctatttcagcataaaacgccacacgatagctggattcattgtattttcatgtcctttatactgggcgtgacagtgcccagagtaaccatttgataataaatagcacagaatcttcccacttgtgtctttgttttctcaaggctggctcaggagagctttctttgggttaacttgttcctcatcttgcttgggggcaggaggcagacaatggaggcagagagattccaaatcagcttgggtagataacattcttgcctaggtaagcatttatctcgaagtgttaattcagaaatggtggcagagaaataccactgtgaaatcaccagtgtgacttcagtgtgcgtgcacttttttttttaaatcaaccatttgaagtttgaatctcttcattccagaagttatctttgaagtctgatctgctggcccagcaggcagtatgactgacattcttgtgccagagaacctcctgtattgctggtgggaatgtcaaatttagatcaatgagtatttatggaaagtgccatcttttctcattcccgaaagtatttcctgcatcttgttccattgctccatagtttcctgccagaacttcaggagattctctatgacaatagcagtgttaaagaagatgcttaaatttagcagatgatttttagttaaaagagaacaattagaagtgggggggggagggaaaaaaaccctcacaccacagttgattatggtacaccatacttttttctttgtttttcctttgacatggagtctcactctgttgcccaggctggcgtgcagtggctcaatgtctgctgactgcaacctctgcctcccagttcaagcgattctcctgcctcagcctcctgagtagctgggattataggcgcccaccaccacgccaggctaatttttatatttttagtagatatggagttttgccatgttggccaggctggtctcgaactcctgatctcatgtcatccgcctgccttagcctctcaaagtgctgagattacaggtatgagccaccatgtccagcctacaccacacatttaaatgtcttccaaccttttggtaatgacagaattttacccacaacaagtggaatcttgttatctccagctcaggacaaggaattcgttctttctccagatggctgccctccctgtttctcctgttcttggcattcttttggttacctaggcttcattttcttttctgtttttctttttctgtatccccttatccaaattgtctctcttaattttgtttctttccttgaaaaacttcctgatctttttgttttagtttctctctgttagcactgcaaatgccaccagcctctaaaccagctgctatagtgtaactagccgcttttttttttggtggcgggtggggggatggagtcttgctctgtcacccaggctggagtgcagtggcgtgatctcggttcactgaaacctctgcctcctgggttcaagcgattcttctgcctcagcctcccgagtagctgggatcacaggtgcgcaccactacaccctgctaatttttgtattttagtagaaacagggttttatcatgttggccaggatggtctcgatctcctgaccttgtgatccacccaccttggcctcccaaagtgctgagattacaggcgtgagccaccgcacccggccagccggcagctttttatcgggtctgtgatgctagctcgtgtcctttcatttaatctagtcccacactgcagttagagtaaccccgccaaaataccgccttcataatgttctccctctgctcctgcccacctgctatggccctcagtgacccctccaagttcagtcaccctgcccttctccacacctttctgtggctgaactattagcttctattgcaggggtctccttcctgtctaactgcacgtggtatattgacttgcagctgtgtgatttggttacatgactctctcacctgaaatgtactcccgtttcccactgaaaacctaacctgaccactcatgcacaggctgcaatataccaaccccagggcagcctcgatgtgatggcctgtttcaactgtctcaattctgaatctgcattgtattttgtgataaattggagttcccacccagccaaagttgccatccggtcctcttttgaatggctggtccagaatgacatgagccagtgtcaaaaagaagggacatttctgtttcgaagatcaaaaccttagctcccagcatttctttgaatacacagacaactctaggggggttctagcgttaaaacctgggtcattagtagccggaggggagtaacaccgaggaactccccacaggtagtcaggttgcctgagcaggcataaagccggtccctggactctggataacaaacccagccctggcccctctctgggtatgtggtccttcagcctcttagactttgtatcatccaatcaaatggattgcagttgatttgatctgggtaggaaccaaaatctgtgtttcaaaaaaccttttcccattttgtatccagaggcacaagaacctttccagttggtcttcaagcagaccctttgggtttctgtttcaaatagttgtttccagaactcttcctgccactgcttgctttctgtccttgctgctgtgtcctgtgatgggctagcactctttccccacccctcaaaatccacagtttgtctcttcagcccttttatctgaatctccaactctgccatttttacctttgcttttgtacaaactaagtttttccaactctttgcaacttcacccctggcttcatgggcatacttttgttcattctagaagtttggagtggggagaactggagataatgcatccacatatgaatgcttttggaagctcccagtgtttttctttaaaagggagttagctttttttgttttttttttttgagacagagtctgtcatccaggctggagtgcagtggcatggtctcggctcactgcaacctctgccttccgggttcaagcaattctcttgcctcagcctcctgagtagctgggaatggcctgtcaccacacccagctaatttttgtatttttagtagagacagggtttcaccatgttggccgggctggtcttgaactcctgacctcaagtgatctgcctgcctcagcctcccaaagtgctgggattacaggtatgagccaccatgcctagctaggagttagcattttatttttatatttatttttttgagacagagtctcgctctgttgcctaggctgaagtggtggagtgcagtggtgccatctcggctcactgaaacctctgcctcccaggttcaagtgattctcctgcctcagcctcttgagtagctgggactacaggcacacaccgccatgcctggctaatttttgtatttttagtagaggcggagtttcactctgttggtcagggttgtctcgaactcctgacctcgtgatccacctgccttggcctcccaaagtgctgggattagaggtgtgagccactgagagagttagcattttttcttttcttttttttttgttattttttttatttgagacggagtctcgctctgtcgcccgggctggagtgcagtggcgtgatcttgcctcactgcaagctctgcctcccggattcacgccattctcctgcctcagcctccagagtagctgggactacaggcacccgccaccacgcccggctaattttttgtatttttagtagagacggggtttcaccatgttagccaggacggtctcaatctcctaacctcgtaatctgcccgccttggcctcccaaagtgctgggattacaggtgtgagccactgagaaagtattttagagttaacacctcattggagaggagaatagtatttccttataggagtattgtcatttctattcagtttttaaattttttttcatgcacttgatcattcatttattcactcattcatccatgcactgaagacactttgggacctccactcctccaggccctgggtcaaggatgttcaaaggtagtgtgtctggagagccctgttctcggctgccttcctcactgtgaatcgaggacacttcttggcattcttagtgtatttgtttttgaagtccaaggaactgaaaagtgcatatatcaaaaggagttttctggccgggggcggtggctcacgcctgtaatctcagcactttgggaggccgaggcgggtggatcacgaggtcaggagatggagaccatcctggctaacacagtgaaactccgtctccactaaaaatacaaaaaattagccgggcgtggtggcgggtgcctgtagtcccagctactcaggaggcagaggcaggagaatggcgtgaacccggcaggcggagcttgcagtgagccaggatcacgccactgcacttcagcctgggtgacacagtgagactccgtctcaaaaaaaaaaaaaaaaaaaggagttttctccataagaaatgatgatcaagtaaggagttaaagtcataggagtggacattgccgtctacgttctgcttgctcatattcatgtaagttaggggtgaaatgagtagtccaggtcatgggccgaggaaagcgggggaggaggggcagaggcgtgcagtactggctggctgctttattggaggtgcggggtcagcttctacatcatatgccactgttggtgggtggctgtttcccttaggcttcctttcttccatggagaactcagagtcacctgcttggccagcacttctgtgtgtgtcagaagagcagactcaaacagtgacacagaagttccctctgtgggctgcacattaaatttcaataatatcaatacccaggtcttactcccagggattatagtgtgtccggtctggggtgggggtcctatcatttgcattttaaaaatgcttctggccgggcgcggtggctcatgcctgtaatcccagcactttgggaggccaaggcgggcggatcacgaggtcaagagctcgagaccatcgtggccaacatggtgaaaccccgaatctactaaaaatacaaaaattagctgggagtggtggtgcacacctgtagtccgagctacttgggaggctgaggcaggagaatcgcttgaacccaggaggtggaggttgcagtgagctgagattacgccactgcactccagcctggcgacagagtgagactctgtctcaaaaagaaaaacaaaaagcttcccaggtgattccactgtgcagccagggttgagaaccactcagttaacatcataaactttgtaggtgaatgcagtttacacagcaatgcaaggaggcaggatctgccaccatccctcgctttgtctgtagggtgcaagttggggcattgatcccgtcctgcccaccacagcccacaggctagtgctctgtacataacaaatgtggaatacttgggtcccaactgactctcctcatttcatgtctattttctgatattcccacagctctgtgaagtggggataacaacacccacacatctcagagctgtgagtaatccctgcacttagagaccacgttggatcagtgaagtggctcagggaaagccagtttcttctgtgtccccattgtcccttgtgtaatgtttttcacttggaaagttctcatctgatggttcattgttgcacttgtgtttaaatggatttccccacagtttagtcttgctttgctgacttggtcattcgccaagacccttcttctttgaaaaatactcttgatcatgtatgacatttagagtcctcaagttttgggataaagtctggtgttgcagaattgggtgttgattgatctggtgttgcactgaattgttcattctttaacgaattcatccaaaatttaaaaagtgtcctccatattcaggcattattctgtgccgcatcccttctttctcaatgcctttaaatggacaggtcacaggagccttttctttgggattatctgggccacccccttcttcccttatacaacctgctgatctcctcttgcaccttctcatgtctggcgactccagggtctggctgtctttattcacctactgctcctgtcctcttctgctcttgtttgtttatttatttatttatttattttttgagatgaagtctcactctgtcgccgaggctcgagtgcagaggtgtgatctcagctcactgcaacctccgcctcccgggttcaagcaattctgccacctcagcctcccaagtagctggattacaagcaccagccatcatgcctggctaatttttgtatttttgtagagatgaggtttcaccatgttggccaggctggtcttgagaactcctgacctcaggtgatccacctgcctcggcctctcaaagtgctgggcttacaggtgtgagccactgcgcctggtctgcttttgtctttagtaattgataattcattatgcacttgcttttctggcctccttcagaagtttgcctcaatatttggcttattatttctcttccacccaacaaaacaagccattttcctttccatatccctgtcacgctcagacatacatgcacacacacacccgttacacatctgtctatattgacttacagaccagctgcctacctggcttccctgctacaggcacttggagaggtatcgcactgaacccaaccgagcagagccagaacctgggcctgggcccgtctgcagggtagagcaggttcttctggaagggccagtccagctgcaagtgctgggatgaagtccaatgtagcatgtaatgtaacagttttccaagagcccagaaagctgttgacattggaagttccccctgagttaatggactgtgaggttgaccgtgtcatgccatccctgttgaattgcttcaatggcatctcattctctattgagtgggacttctaaggccctctgtggtctgaccctgctcagacctctccacagcctcttctcccactgctaaccacatcttgaccattctgtgatatctgtagttccatcacgtgagctttatttcacctatggcactctgacttactccagcccaccctgtcatccttcttattgtttccatagcaatttctttgtacatctgaccagtacaccatttttcacctatttgttgacttgcctgtctctccttaagggccgagagttttgcctatatttgttatgcctagcacagtgcctgacatacaatgtagagtctgtaaatatttgttgagtgaacaaatcccaatacagacaagcaatggaaatctgttaatagtaggtattggctggacgcggtggctaacgcctgtaatcccagcgctttgggaggccgaggtgggtggatcatgaggtcaggagttcaagaccagcctggcccacatggtgaaaccctgtctatactgaaaatacaaaaatcagccaagcgtggtggcggtcgcctgtaatcccagctactcaggaagctgaggcagagaattgcttgaacctaggaggcggaggttgcagtgagctgacatggtgccactgcactccagcctggcaacagagtgagactccatctcaaaacaaaaacaaacaaacaaacaaacaaaaataatgggtattatttagagaccagacagacggacagagggggttagggcagtcactagtgaggaagcagagcgaagatccgctggggaggggcaggggctggctccagaaggctaggagacctcagtgggtcacccaggcaggattttttttttttaagacagagtcttactctgtcacccaggctggattgcagtggcacaatctcggctcaatgcaacctccacctcctgggtttaagcgattcttctgcctcagcctccctagtatctgggactataggcacccaccaccatgcctggctaatttttttttggtatttttagtagtgatggggtttcgccatgttggccagactggtctcgaactcctgacctcaggtgatccaccacccatctatctcggcctcccaaagtgctaggattacaggcgtgagccaccacaccaggcctcaggcaggatttaaaggtggaacaaggaagaatccaggtaactagactaagaaagagaatggatagaacttttggaaccaaggcctctgctcacattattttttttattttttatttttgagatggagtctcgctctgtcgcccaggctggagtgcagtggcacgatctcagctcactgcaagctccgcctcctgggttcacaccattctcctgcctcagcctcccgagtagctgggactacaggcgcccgccaccatgcccggctaattttttgtatttttagttcaccatgttagccatgatggtcttgatctcctgacctcgtgatccgcctgcctcggcctcccaaagtggtgggattacaggcgtgagccaccgtgcctggctggcttccactcacattctaaaccagaatacaaggtcaggaacaagccagcagcagaaacaagaagttcagacactctctgcactcatgagtggagtccaaatatggttacagaaaatccacagaatctagtaaccaggaggaccctgatgacttgaagacattattaatttggcatgttctcatctacccaatcaatgcaaagaagaaatggattacattttttgtaacaggattatttactgatgatgaatattccattcagccttaaaacttacattatactcaacaaaaacttatttctagatttagagccatggatctctagccagaaattcattaacacacatagtcaacaagtatttgttgagtatctagaaagtgccatacaggtgacaggtggaccttgtactccagaccccagtgctaggagtcaagcatgagaagtgtccaagaatcctactaagtgtgttcctcagttcagatttgggagcgatttctgtttctgaaagtctcagacacctgtatcactccacttattgctgtgggatagtatcatcgtcaacagaaagagaattgtaattaaacactacatttctactgcatgaagtctccttttaaagaatatgacttcaaaatactctaatgtgactgcagacttgttggcatttgctgagtagtgatatttttacatatagtagaggtttttttttttttttttttaagggaactctacctgcatggctttaaagggctttctttaagtgagagaacagctgttctcctccaggcgttctgggctaaggcctccttctcctctcaggaacagaacaaaggcatacagaatttatgtcatagatggatttttgtttgataaaaatcacttattactaaacaaaagaatggcccattctctttagaaatatgagcataacatctcctgtgtctttagtggtttccaactttgttggtttacttttaattattataattgactgaatttaaatgggccgtgttttatataatcaaactttccttgaaaatgtgtgtataagatggttattggtaaagggaatcatttcaaattcaatattaaaataaatccaaaataatatttgaaggaatcagctaataaagaaaataaccctttggtcactgttgtaggggccagatgtggtcacacctataatctcagcactttgagaggctgaggcaggaagatcccttgagcccaggagttcgagaccagcctgggcaacatagggagaccccccaactctacaaaaaaaaaaaaagaaagaaattagccaggtgtggtggcatgcatctgtagccccagctacttaggatgctgaagcaggaggatcacttgagcccaagaggtcgaggctgcagtaaactatgattgcaccactgtattctagcctgagccacagggtgagaccccatctctaaaaataaaaatataaataaaacgtgtatccactttttggtggataatggaagccactgaagaagatggaggtacacgaggattggttagtccctacaatctgaccacataatcacaagagaataacttggatccaacacgcacttctgcaatacacattatgaacatacctttactagcaagcagactcataacaagtcctaggccatatccttcaaactgatagtcacagctttctgtctttttgggtattcagacttctctcttggtgattggccgccttcctaatgctggatacaggacatttcagggatcaagcatcaggttccatcaaattccttcaggatgtgagtttcaggccacataaatttataccacttacttacaagagtgaggagaatctctgttttaacagttttattgtagtataatttacataccctaaacttctgccaattgttaagtgtacagtttaatgttttttagtaaatttagagtgctatacaatcacagtctggtgtaaacctttccaagactgcagaaagtgtcatcattttcatttgtgcccagaaatcttctgctgtctgtactttgggaagtgcctgttctggaaatttcatatacatggagtcatacaaaatggagtcttttttttgagacggagtccagctctgtcataccccagctctgttgcccaggctggagtgcagtggtgtgatcttggctcactgcagcctccacctcccgggttcaagtgattgtcctgcctcagactcccgagtagctgggattacaggcacctgccaccacccctggctaattgttgtatttttagtagaggcagggtttcaccacgttgtccagggtagtctagaactcctgacctcaagtgatctgccagtctcggcccctcaaagtgctgggattacaggtgtgagccacctcacctgaccaaaatggagtcttttgtgtgtacttctttcacttagtattttctaggttcatctattttgtaacatatatcaataatgttctactttattgctgaatggtattccaatgtgtagatagagcacattttatttattcagtcatccgttgatggacattttgattgttttcaggtttttggagctatcaagaagaatgctgtaaacattcacatacaattctttgtttagatataggtttcatttctcttgagtgaaattcctaggattagaatatgggtcgtgtggtaagtttgtgttttccaaagtgtctgcactgttttacagccctaccagcagtgtctgagtgttccatcttccccacattcttaccaacactatgcattacctgatgatagacatacagtgacttcaaagtggtatctcatggtgttattttgtatttctccaatgattaatgacattgagcatcttttcagatgcttcttagccattcatatatctttggtgaaatgtctattcaagtattttgcccaatttttaatcgagttgtttatattcttagttaagagttttgcatatttcctggatacaaagcctttatcagacatgtgatttgaaagtatttttctcccagtctgttctgtgcttgtctttttttttttttttttttttttttttttttgagacaaagtctggctctgtcgcccaggctggaacgcagtagtgtgatctcggctcactgcaagctccgcctcccgggttcacgccgttctcctgcctcagcctcccgagtagctgggactacaggcgcccgccaccatgcctggctaattttttgtattttttagtagagacggggtttcaccgtgttagccaggatggtctctatctcctgacctcgtgatctgcccacctcggcctcccaaagtgctgggattacaggcgtgaaccaccgcgcccggcctatgcttgtctttttgttttcttaatggtatgttttgtagtgccataggttttttttattttttgttatttttatttttattttgatgaggtccatttgatcaattattttcttttgtgggttattcttttggtgtcgtatttgagaatttctttgcctaatccaagatcgcagattttcttctggaaagtttataatttagctattatgatccatttgagttagcttttgtgtatggtaaggagtcaggatgtaagttcatttttttcatatagatatccagtggtcccagcaacatttgttgaaaattgccttcgcacctttgccaaaaatcaaatgaccataaatataagtatatatttttggactctattttgttccattgatctatgcatctgttttatgctaatatcacacagtctggacttctttggctttatagtaagttttgaaataggtagtgtaagtcattcaactttgttaactttttctaaagtgctttaactgttctaggtcatttgtatttccaattgtatcagcttgccaatttctccaaaaaaaaaaaagccagctgagattttgatagcaattggatggaacctacagatcaatttaaggagaattgctgtctaacaatattgaatcttcccgttcatgaataagaaatatcttttcattcatttaaatcttctttaatttctcccccagaatttttataggttttctgtgaataacatttctttcattgaatttttcttgaatttctttcattctttttattattattattttttgttcaagtattttgttccttttgaataaagaaggctggtgtggatggagagctgatccagcccttctgtggctctcctgtttccaggatctcgttattacaattttggctggtccagctatcggttgcatgcaccctactgggactaaaacctcaggctagcccagctgtgagctttccccattcattttctaccaagttcactacttttgctgataagatcattaggcatgtgcttctgctctgctctgaatcaagccagccttctccatcagtggagctgctggctttcacggctagccctgccttaggaaactcccctgccaacgggctggggtgagaatggagctgcctctgctggaaggacgctctcttccacgcatcttacccaaaactctagcagcttttcctaaagaaaagcttcccagtttgttgtttgtcttaaggtgattttcagagtcctgaaatggttgcttttgaaaactttgttcacttacataatttttttgggtgggagagaatttgtcaacttccttattatgccatagacaaaagttgctctatattttatatatatacacatatggaatggggtgggggagagatagagagagagagagagagagagtcttacttggtcacctaggctggattgcagtggtgtgatcacggctcattgcagccttgacctcctgggctcaagagatcttcccacttcagcttcctgagtagctgggactacagacacgcactaccatgcccagctaattaaaaaaaaattgttacccaggctggtgttgtactcctgggctcaagcagtcttcctgccccgacttctcaaaatggtgggattacaggtgtgagccacgatgcccagctctaaaatgtaattgatatggagaccttgactaccatgaatttcaccagtggaaatctgtttccattagtcatcatgccattaacaatccactgattttactaatatcccattgctatattctccctggtaattaacaaagtgctggtgtcatggagacagaaagagcagggtgcctctggaatgtgggcagtattcccgattggagaaccaccagctaactatccaggaagacacatcacctgttttaatactagctgcttaacctgtgtctctcacacacacatataccataccacagtctatactgaagtattttcttttttttgagacggagtctcgcgctgttgcctgggctggagcgcaatggcgcgatctcggctcactgcaacctccgcctcccaggttcaagcaattcccctgcctcagccttctgagtaactggaattacaggcgcctgccaccacgcctggcgaattttttgtatttttagtagagatggggtttcactatgtttgccaggctggtctccaattcctgacctcatgatctgcccgcctgggcctcccaaagtgctgggatacaggcgtgagccacagcgcctggcctactgaagtgttttcaagctatttaactggattttcacctttagtcaaacctcactcagttaatgtctccagtttgagtaattgtcagcacactgaagtaaaggagaattccgtgggaattgcagtccctgagaggaagcagatgccaaattcaaagaagggctctttgggctgcttgggcccatagccccagaagctgaaagagagctggcactctcctggaaaccaatgaggcccttaaacttgccagccttcttcagagctggagcctggggactggagacaggaaggggagggctcctggaggagaaggggtagaaagtgcaacccagaactgaaagggagaaaattcactgttctgtgtgtacatcatagtggggggtgtagtgaggatagaccatttgagtattaccagtttgttttaaaagaaaatacattaaacaagactcgcataaatgtaatttaagagagtaatctattaatgtggtccagcctgggttttgattccttcattaccaaagtgtggacataaagtaaattttctgtcactgtattatcataatacagatatagggaagaacttaggaaatcaaaggaaacaaatttttaattttttaatgacagcagaggagagacagagagagagagagagagagagagagagaaaggtcctgaggcaaccagggaacagcttgtcaatttctacaaaaaaaaaaaaaaaaaaccagccaagggatattgggatattgctggaattggatggaatctatagatcaatttggggagaactgctatctcacaatgttgaatcttcctatctacaaataagaattatctttttattcatttagaacttctttaatttctcgaaaaatgtttataggttttcagtgtagtggtcttgaatttattttgttaaaatttttttcctaaatattttattctttttgaataaaactgagaaatttatagttctgggcactgcctgtgtggatggggcctgaactgcactggtttgacttaatatattgatttccctggttgttactgagttcaacttgttcatatgttgtgtccttaattttggaacccttgaagtttttcctcttaacagtaagccaaaaacctttgttttaactgaagtaccacattgcctttaaaaatagttgccaaaggtctccaagacttgaatgaagagtgaggaatctggagttctggttaaatagtgacagaaagctgctggaaggagtgagagcttatgaagcagtctgatgatcttgtgccaagtttggctgaatttattaaactcagggtgtttgagctggaaaaaaggtccaggagatcatctaatatcttttttttttttttttttttgagacagagtctcgctctgtcacccaagctggagtgcagtggcgcaatctcggctcactgcaactgcctcccgggttcaggccattctcctgcctcagcctcccgagtagctgggactacaggtgcttgccaccacgtgcggctaattttttgtatttttaatagagacagggtttcactgtgttagccaggatggtcttgataatttcttgaactcagtgcagcatcccctgggaacttgttaaatcgaagtatctcagccccactccagacctactgcatcagaatctgcactggaaccggatccccaggcgatttgtacatgtgaaagtggagaagcccttggctgggcgtagtggctcactcctataatcctggcactttgggagactgaggtgagcagactgcttgagcttgggagatggagacgagcttgggcaacgtagcaaaaccctgtctctactaaaaatacaaaaaattagccgggcatggtggcacacacctgtagtcccagctactcccggaggctgaggtgggaggatcccttgaacccgggaggcggaggatgcggggagccgatatcgtgacactgcactccagcctgggcaacagagagagattgtctcaaaaaaaaaaaaaaaaagttgagaaaccctgcagtaattcttatctctctaccttgtgcgtaattaaatcttagttatcaaatgtgtgaatgctaaagggtcatcttccatctaccttaatgttatggtattattaatcaaccttagatcatgttagcatttttcctagcgctgttctcacattgtgcacacctctctcagagaaccgtaacatcttttccacctttgccaggacttgctgtgcttgcacgtggattttgggggaaaagtggaaggtgctgtattgatccctactaaacttactctggttttattttggccactcttgagattcccctaattccatgtacttttcacacatttgatgccttttttttgaccgagtctcgctctgtcgcccaggctggagtgcagtggcgcgatctcagctcactgcaagctccacctcccgggttcatgccattctcctgcctcagcctcccgagtagctgggaccacaggcgccccccaccatgcacggctaattttttgtatttttagtggagacggggtttcaccgtgttagccaggatggtcttgatctcctgacctcgtgatctgcccgcctcggcctcccaaagtgctgggattacaggcgtgagccactgcgccccgccatttgacgcctttttaataccattatctaagtcaggatttaaaatattgaacaaggaagtgttggctacacagcatggaaaacccaattctctgctcctcaattcagtatactttatgttgcttgcgtcatttttaaagaccgctttttgggaaaatatactccttcccaggttttccccatgcgattgcgcctgtgcggtgaatgagcatgtgctgccaccacaggaaattggttcacatggagacctttgggatggccagcagaagagactgagaagttgcttgagggaaaccacgagtctgtattatgatgtatgatgtatgtatgtagcatgatatatgtagcgtggagaccaaaagaaacagggtttaagaaagagagaaagatcatttttgacaaaagctgctgcaagttcaagtgtactgaaagtaagctgcttgttgggtttgccaagatggaagctatggagaccttgcaaagggcattcttttttctttttcttttttttttttttttccgagacagagactcgctctgttgacaggctagagtgcagtggcctgatcccagctcactgcagcctccgcctcctgggttcaagtgattctcctgcctcagcctcccgagtagctgggactacaggtgcgtgccaccacgcctggctaattttttgtatttttagtagaagtggggtttcaccatgttagccaggatggtctcgatctcctgacctcgtgatccacctgcctcggcctcccaaagtgctggcatgagccaccgcgcccggctggcattcttagtgattaaaaggaacagcttctcagttggaactgagtgaagagagaatgtgaggcaaagaattggagacaatgaagacaattcttgttatatacagccttaatctaggaatagccttttgaaaaagagaaaaactaccaggttcaaagtatatgtgtttataaagaggtggcttcatttcagggggaaaatggtactagaactgagaaaatatagtgttgtatcaatcccagtgagaatgacaccaaaataatttaactctgtgcacctgtgatcagagtgttttgttgttaaatatatttgtctgccattggtgcataaggtaaaacgtaactcaaatgatttctttgtctgtaagatgaccctttagatatgtactggaataaaagtagctctaatcctgtggatccagccaccttggggtcttcgtgctggtgttctgttagagatggtgatgcatttgacatctcaagtgccaaatgatttgatcggaggtactggtcactggacatttttaaggacaatttcttattgcagctaccactaggcacatgcaggaccagtcatgtaaattgaggagccagtgcaaagtgaaaatgtgggactcttgctttaaattcttaaacatttcaacagtttcagcatagcactaaaccaaaagtgattgtgcaggtcacatactcatgaaatggtcctcagcacatgccccgggatagtgaaacaaggatgctaaagttttaaagcataagcaagtaacatctgtacaatcaagtgcagaagtggcagaagaaaggggaagaaataactaagaccttcagggttttgtagaaaagttcatggcctttgaaagtgttcgggctggttagaaaactggtgttttaagtatttaaataaaggatataaatattgcaagtgttataaatgatataagtaaaatttaatatagctgcattttaatccaacagtgttgtcattattcaacttaaaggctgcatttgcttttttatttttcacctgtaaggatttaggagagaggtacagtgacttctcaggacactgggaatggtatgaaattttaaatatgttgcatattgtggtactattgtgttttgcctaagtgcaataataattttaatcaggtagaacatttaaattgttgtccttggaaacaaaagagaaaactgcttcacgatgaatgaattaaagttcttttctctgcaactaaacttgtatactaaatgaaaaatcacagagtcattgaatatgagcatttaaatgaaccattgtgagaggagtaggcggatactgataacatactgtttttctgcagaaaatatttgtggttaacttgttcataccatgtgtttctcttacaatcaaaacctctgtctttttcaaggacaccttgagcacattgctagggaaatggaacttttaacaaaaccctgctaaatctttctgcttaccaccccctcttgttttctgattaaacttctcttcatcgtcccacatgaggggggaaaagaaatcaacttgttaaatgccagactcccaggagtttgggtttgacttttctctcactgtatggggtctttattccctccctcccttccttctctctctttttctctctctctctgttctctttctttctttcaatatctctccctgtctttctttctcaccacccacatattttcttgtcctgtgctggaaagggctttggtccttgcctggtggaatcgctagaatatcttaaagcttttcttttactaacagccatccatgattactttggtttagtccaaaaaccaagaatttgcttttgaaggagggggctattctccccttagtgtttctgcatcaagctgaaagagctccctgcttagagtaagtcaagtcaccttccttaaaaaaaatactcccaggtgttagagatctctttattagagtcataaaataactactggttattttaaatagttctctttggaaatgaaagtcccgttttacattaaacaggcaagactttgatatatttcacatatttaagccttagctttgattttttagtatttaaacatactgagaatactggtctttgagacacaaaatgagttcatttagtagtggtttaaaataatttttaacttataacgaataactggaaacagaatttctttaagcaggggactcctgttacaggaacatgtttggtggcaggtttcccaggggagaggatccgggaataaggaagcacttattgtagggtgccattgccacttgctgatggctcagaagtggagctgaggcctcttggaactatgtagtattgggaacgcatgttcatgtatacttaattttcaaacacacctactttatgacacgtggctatatttgtattgttttctggggaaataaaaggtttgagtgaagatgaattttgccacaacttgtaaacagccccctgaacctgttggggatgcattgctccgaatcatttcagtttaatccttcccccatctccacccctcacacctttcctatgtgttcacagccctcagcagtcacagagaacatgtccctgaaaacgtgctggagcatcaagtgcaagaaatcagataataattatgttcgaagagggtgattttattccccaggagaaataaaacctcgctcaggcaacagggggtttattgaggaccggggctggaggcagctgctgccaggcccaccccaggtcattgggccttcgcctgagctcttggcttgagcccctcccactcaccttcacaatccatgtgggtgagaggtcatgggcctcctggctgccttgttcctgagatgcacgggatcctggaagaggaggtagggcaaggacactagcagagtcacctcaccaccaagtggaattcttcctctgcccttaactccttgcaccttccctaccagggttttgttttgttttgttgcccaggctggagtgcagtggcacgatcttggctcactgcaatgtccgcctcctgggttcaagtgattctcctgcctcaacctcccgattaggtgggactacaggtgcttcaccacgtctggctaattttttgtatttttagtagagatgaggttcaccatcatctcctgatggtggtcttgaactcctgacctcaagtgattcgcctgcctcagcctccgaacgtgctgagattacaggcatgagccaccaccctggcccctagcagggttctttacctttatggtcccaattaatccctttggcagagcttgtggacctattctcagcatggtttttgttgctgttttttttagagacaaagtctcactgtctcccaggctggagtgcggtggcgaaatcatagctctgcaacctcgagctcctaggctcaagcgatcctcttgcctcagcctccccagaagctgggattacagacctgagcctccgtgtccagcctcttgacatatttttaaatgcataaagaatatattagacagcaggcactgtggctcatgcctgtaatctcagcagtttgggaggctgagatggaaggattgtttgaggccaggagtccgaccagcctgggcaacattgagagactctgtctctacgagaaaaataaataaataaaatcaaccaggcatggtggcatgcaccctagccccaggtactcgggaggctgaggtaggaggatcgcttgagcctgggagttcgaggtggcagtgagctgtgattgcaccgctgcactccagcctgagcaacagaataaaaacctatctccaaaaaataaaataataataaaaaaaataattttttaaaacaaaaaagttagaaagccaagtatgttaaaattcagtgttacccgtgcatggctagctccttctcattttttacataacccgttcagtgttacctcctgaggtgccttcccttgtcggcttacgtgacaattaaaagattgtgatttacaaatatgcagttaacttacaggggcacaagtactcagtgtggcaaagccaacagcagcaagaacaataagatcaaatgagaaaagggcagggaggaaggaggagacgaagggaggaagggaagggggaacgggcgaatcgtgctatgaggccatgccttgacaagcccctgagctgagctgaggtcagcctttcctttaggcctctcactgtgcacatttttctgggctaagagtatttcttctatttcgaggtatgtgcttttcatacccagtggcccctaaaggccaacccacttcttcttctaaaacttaagagaaacagagattcaaatatatgagctataatcatgaaagactaattatatttgaggaaacttagtgatacccccgataatatgaacataataagagcagctattttttgagatcttaatacattgtatgaaaccctttacctacatgatctcattgattgctcacaaaaacgcctgggtgccgtgcttctcatcattcatatagagagactgggaggtaaagccctcggccaaggccacactgatggcagccagtagacctggaattcacactgggggctgcctgacttgaagcctgtgttcttcttctttatcaatgccatctttcctaggcactagcgatttcagagtttggattccaacaaaatccaaatacatattgatataaaaatacataattagaattaacatttccatttgaaacctggacacacaggttagacactcaatatgctatatttgaatagaatttactgtcttgaaataattccgcatgatgtaggtttactcacatcctgaggagtgggccgggggaaggaagagctggttgccatgggcatctgctggaagcaaagccatcctccaggatcctctggcttcctgagccaagatggcatggagcatcatctgtttctcttccaactcatcttatggtggaagttgtgaaggagcaactttcctgccagtgctccaccccttattcacccattcctattctggaagatagtgataaaatctgattcttaagaattggaaggttaacctatgaagggatagatttaaagacttgatgaactttgattttacctgcaatatctcaaccaggacttgttactgctaccaaaactcccactcattatgacatttttgtcatctttctgaagtcattacaggacattttatagacctttctttttttagatgaaagggtcaacttcagtccgacgcacaaagaagcaaagaataataatttttctctctatttctatttgcttcttttgtccaagaagatcaaagaattaccagattatttctgtccacccttgcgcacactgaatggagaaaagtttttctcacttcattttctaaatagagagcgagatcatggtgggcagatttagctggtagtttactaaggtaaaattaagaatcacagcatctcagaaaaaaaggactcgtagagatactcatttaatagctgaggaaattgaggctgagaatttgacttgaccaaagacacagagtcggcagcaggctgagtctagattttaggtgctgggtcccgtgcgcctgtgtggtccctgagggagaggcagagggatctctttccttcacttgctcattcttccactcaggcattatcatcattcacgcgagccagacactgtcctagggccgtttttgtttttattttttggaaaaggatagtgggggagaagaactggggagagacaggtcagtaaattcatgatctctgtatgaatgataagtgcagtggggcatgctgagctgaggtagaaccaaagacattcgcctggggttcaggaaagatctggacttggctggaaggatgaatagggcgtgaatggatctatgaaaggtacaaagggaaggaaattgaaatggatctaaagagcatggagaggagtcagtgaaagacgttatatctgttcctgtctgaatgcatgcccttctatttctgcctaggtgatgcctgatcatttctcttgctctagaatatctcctcaaatctgttttcaaatattgctgcagttttaatattatgtttatccacatcggtgagaagaagcttctctttccttcttggttgtgagaaccctggggtcaggaaaagctcggtcattcatcatagtgccctgggaggtgcctggcacagtgctgcacacctaagaggtgcttgttaaaagtttattgaccttaatcaaacattcattctcagccgctttttctgacgcatatgtgtaaatcatagatatgttactgaataggaatccagccaccctcctaaaattcatgtcattagaataccttaatcttattaacctggaatactatgttattagaataccttgatattattatcctggaatattattaaatagttccagaatttttcactaaatcatgctatttgtagttgttagaggtgctgtttttattgctcagtcaggtgactaccaggtttcaaagaaaatgctgattaacagggtagcttctttccaataccagacttctctgatcaaattatagatgttcacttgggcgaatgggtaagattaagggtaaaataggccaggagcggtggctcacacctgtaatcccagcactttgggaggctgaggcgggcggatcaggaagtcaggagatcgagaccatcctggctaacatggtgaaaccccatctctactaaaaatacaaaaaattagccaggcttggtggcgggtgcctctagtcccagctactccggaggctgaggcaggagaatggcatgaacccgggaggtggagcttgcagtgagcggagatcgcgccactgcactccagcctgggcgacagagcaagactcttgtctcaaaaaaaaaaaaagaagaagaagaagaacaaaagagtaaaataaatggaaaacaaaatggatttgtatgttttttaaagatcacaaatttctcaatttagattgagaaatttagaaacttaaattcctacttttccaaatttctccatggattgaataagtagctttgtttttcaaaataaaaactcccaacaccagaagccaccctgattattcaaccctataaaatattcatattctcttgtttcattctggaaaagaatgatctggaaatattgcctcagatcctgtagctaagaattgcaaatcattttcttttcagaacatcaccttgattttgagtatggatcaagcaaatacaacattttctagaactcagaaactttttttttccaaaatggaaaaaaaacctcatacttctcttacacacaaatgaattaagactttgaatgcttggcttctgaatcatttgaaaaatattggcgaagaagttgttgtaacaagtctcaggcctagccaacattttagatgctttggttttaagacagggaagatacatgctgctgggaagaaacccaaaaacctctaaaaatgaattataaactatctggaagtgtctcagctgtggtaattatggtagtggcattgttgtctgccaccttggtggccgtttttcacctaatgtttataagagaatcttccagtaggttaacatgatcctgaaatgcacttcaaaaggccaagtgtacagaaagggtttaaaaacagtaactgctagtgaatgagaaggaatttatttcatgctcgatggagtttggctttataaattttttagctgctggttaaatccacagtagaggaatgattccattgtgtgtcctgagtggaagaaaaaagtaaaaattagtatcacagtaacagtgactgaagtgaataacattttctcaacaaaaaacatgcagactaatttattaagtccttgatgaagtaggtgggaaaactgtgtcacgccacataggtacagtcctcgttttacccttgatttttatgtgtaaaaccaaacatagcttcttggtactgtcctgatcctaatgctccttctcactctctgatttcctatctcacctcctgctcaatggtcatgtggttcccctttattgaactatttcagtagtctgcaatgagtcagcaaccttagggactttttaaaaaattttatttaccagtctgggcaaaaagagtgaaaccccatctaaaaaaaaaaaaaaaaaaaaaattctgtttaaaacatgcttgctctagtacacatttctaaccccaccccccaaccgccgctttttttttttttttttttttctgagacagaatctcactctgttgcccaggctggagtgcagtggcgtgatctcagctcactgcaacctccgcttctcaactttaagtgattctcctgcctcagcctcccgagtagctggattacaggcatgcgccaccatgccccactaattttttttgtaattttagtagagatggagttttaccatggtggccaggctggtctcgaactcctgacctcaagtgatccgcccgcctcggcctcccgaagtgctgggattacaggcgtgagccattgcgcccggccccaaccttctttcatcttctttcatcttggaacagatgtggttctttgcaacaaaaggatagtgattaactatgaaaagggagtaaatataatatgtaagacatcatttttagcgaatatttttttccaaatattagcttatctgagaaggaagatttagttttagtgaaagacaacccaaatatttttatgaaattaattatttgaaggttttacttgcataggcatgctaatgaagtatatttcttctaaatatactttcaataaaaaagcaatctttctttttattaaaagtatatttagggcccggcgcggtggctcaagcctgtaatcccagcactttgggaggccgagacgagtggatcacttgaggtcagaagttcaagaccagcctgaccaacatggtgaaactccgtctctattaaaaatacaaaaattagctgggcgtggtggtgcgcatgtgtaatcccagctactcaggaggctgaggcaggagaatcgcttgaacccgggaggtggaggttgcagtgagccaagatagtgccactgcactccagcctgggcgacagagactatgtctcaaaaaaaaaaaaagtatatatatatatatatttagaacagccaggtaagaaacctgtctagtgcaaagaactacctgatgctgattactataactgagatattattctccaaaaacagttaaatttatgttcatgaggtttgagctgctttttctcagtggctcagggcaaagactccagcatacatagtgtgtggtgcccccatgactccctggccccctcccctcctcaataacacaagaccctgcagttactcagattgggaggtagtggggagttcttttgatgtcctgcaactggtgggggtgaataaggagcaagtgggaacattcgttaactggtgaagtatttgttgttaatagagaaatgcattgtgaagtcagttcttgtaaccttggtttctttttcttgcttgactagtctttgtgaagggaatggatagagttgattgtactgtaaatctaattgcatgtatgtaatacagaaccaaaaaatgtcattttagctgtttggacaaaacgctatagtttaaaagcatattttatttaaaatgattagctgataagagaaatttgaatcagaatactagaatattatggtcataaaggatggaggaaattattgtttatcttagtaccaaatagaataaacgtcagcccctgctacaggtaagtaccacacataagaatgtatgtgttactgtaggagctacattattacataaaatataactgtctaactactggttgatgaaaataataaattggggagctacatgattaaacataatgactcatctggttccgcataaagcatttttttttcttattttatattaaaaacaaaagaagtccctttacagggatatgataaaaataagcatctttaagttaaaaatgaaaataaatatattaaacatagtataagatgtaacttcatattatgtttcaaaattaagaataatgctttagagtacaaatattaaataactattttatcttgagagggtaaggacttattgacagaatggggtccttctatttgacagaattactaataggtagttctgttttatgtaaaaagtttttgaaagactacctaatgtatttttttaatagatgcatggtaaggtttttagtgtagcaagtgttagagaaataaccatttttgtttgataatttaaaatttaaaatatttataatggaaaagatcattgaacgtattaggcagtgcctaaaaaataacagtggaagccatgaattccttctgtgttactaaaattacactgtgctattttaaatttcactgaaaaataaacatttcagtaatggtatttctatatggtttttacaaagaaaagattatattctgtgatcttttaagatcaagctgtactatgttagagaaacgccactaagctgagaccctcgcagtatgctctcagctcagtgtccatgcctggagaatgtctcctcaacatcgcgtacaccactgtttctagatctttacagaatcttcactgctgctatccccttttaccaagataaagttaaatctccaaagaaccgaatggaggtacttttctcacagtcacccagaaattgtttcctgaatagtttggacctggtactgatcttggctgcttaaagataaaatcagctgagacaaaggaactgtacaaaggcaaagatcaataatgacttgaaaagcattttgaaaactggatctttgggttctaaaattttgttcagcaaagaaaacaggagtaaagaaagagaagagagagacaaaaaaaaatcctagataattatagaaaagaccttgtaaatactaccagtgtcaactggaccaaagtgaggacagaataaatgcccttctttcaagtgaaagacgttcgaattgcattgataaatatatgcattggatcatttgaaacttcccttaaggcctgtttcacagcattttattgtaaacattttcaatcagaaaagtggaaagaattgtacagtgaacccccatactctcgccttgttttttttgtttgtttttttgtttgtttttgagactcagtctcgctctgttgtccaggctggagtgcagtggcacgatctccacagcggctgaactgatttacactcccaccgacagtatatacgcattcccttttctccacagcttctccagtatctgttgttttttgactttttaataatagacattctgactagtgtgagatggcatatcatcggaagccagcttactttgtggtgcatttcgaagtgaattggagacataagtagactttactcctaaacatttctgcatgtacattggtatttatgattcttttatttatttatttatttttgaggtagaatgtgcacatactaagatacacggatctacccaaatcttaggtgtactcattctatgatttttcacaattgcatctgcctgtgaaacccaaagctttatcgagatatgaacgtattaccctagaaagttcctctgtcgtttcatagtcaatccccaccccctgcaacaatgttttgacttttctccgtagatgaattttgcttctcccagaatttcatatagatgaaaccctgctgcgtatactgtgtttgtgtaaggattccttcattcagcacatagactttcaatctccttttgattcacctaccaagtgggatggggtaagctcattccttggatttcaagtggctcagctgatttggtaaattttcactttcaggcctgtttcctgccattctcaatcttgccagcaatgctcacatcagcaccaatgccacctgtggcgagaaggggcccgagatgttctgcaaacttgtggagcatgtgccaggtcggcccgtccgaaacccacagtgccggatctgtgatggcaacagcgcaaaccccagaggcaagtgtcgtgcctttatttctgaaattcccatgggaatgtacactttgtgaaatgaggactgagacttctgttaggaagccataaacattgtgttcaccttcactgctctttgtttccactagcggtttagaacttaagaaatttaaagcaacagccgagaggaattcatgttttttattttcttttaacagaacgccatccaatatcacatgccatagatggcaccaataactggtggcaaagtcccagcattcagaatgggagagagtatcactgggtcacaatcactctggacttaagacaggtaggtgaggccagaaccattgaagagtgtctacaggctgctgaactgtggtcttctgatgacttttgggaaagcctggcttctttctgaacacatttacattctagtctcactatttccaccaggtgaaggcaagtggtatacagaaggagtccccggtgccatttcttgtcactttcatcattcccaggtgtctttggggagatgggtgaaattgcttccatatggttgatgttctttgaagctgtgtcaacagggcacactcatccatccagggtatcatgtcaggctgcttgctggctgccaacagatgcatggggagggagagggggaaaacacatgtatttcctaacttttagcttactgtcttgctaatgtcattgagtaagttattgtataaggattatataaggctagaagaaaaaaaaacaaaacggtgttaaacctcttgactgtgtctcccctgccagatgcagtctgtctgggccaggtaagctggagttgcccaatactaacttaagcagtgccttcagcatgagtggggagagggaaggtatgactggctccagccacacctgcatcttcttaccttgcttcaaggccacataggaggatggagagaaatatgagatgagccccagttgccctgatgttcctgggaaagaaaaagaaaaggagtctgagtggaagaatgaaaaagagagatggcaggtgttttggagcttctgtcctggttctgttttgagcttttcagaaaagccatcgcattaattcttatttatttccattcagtttctcttgtgttagaactcataagtttcatgtaaaatatgagatcggttaaaagacacaagtaattgtaatgtgcattgtaggatttaaataagaattatagagatttaaggacaatcagaattctttgaataagtgatagttttaaaatgtgcaggaattttttttattttttatttttattttttattttttgagacaaagtatcactctgtcatcaggctggagtgcagtggcgcgatctcagcacactgcaacttccgcctccccggttcaagcgattctcctgcctcagcctcccgattagctgggactacaggctcctgtcgccatgcccggttaatttttttgtgtttttagtagannnnnnnnnnnnnnnnnnnnnnnnnnnnnnnnnnnnnnnnnnnnnnnnnnnnnnnnnnnnnnnnnnnnnnnnnnnnnnnnnnnnnnnnnnnnnnnnnnnnnnnnnnnnnnnnnnnnnnnnnnnnnnnnnnnnnnnnnnnnnnnnnnnnnnnnnnnnnnnnnnnnnnnnnnnnnnnnnnnnnnnnnnnnnnnnnnnnnnnnnnnnnnnnnnnnnnnnnnnnnnnnnnnnnnnnnnnnnnnnnnnnnnnnnnnnnnnnnnnnnnnnnnnnnnnnnnnnnnnnnnnnnnngtggctcacgcctgtaatcccggcactttgggaggccaaggcgggtggatcacgaggtcaggagatcgagaccatcctggctaacacggtgaaaccccatctttactaaaaatacaaaaacttagctgggcgtggtggcaggcgcctgtagtcccagctactcgggaggctgaggcaggagaatggcgtgaacccaggaggcagaggttgcagtgagccgagatcacaccactgcactccagcctgggcgacagagcgagactctgtctcaaaataaaataaaataaaataaaataaaataaaaaacaaaaaaaaataaaaagagaaaagagcttctttgaaaagagcttctttgttgttgctgttgtttttttttttttttttttgagacggagtatcactcttattacccaggctggagtgcagtggctggatcttggctgnnnnnnnnnnnnnnnnnnnnnnnnnnnnnnnnnnnnnnnnnnnnnnnnnnnnnnnnnnnnnnnnnnnnctacttgggaggctgaggcaggagaatggcgtgaacctgggaggcagagcttgcagtgagccgaggctgcacccctgcactccagcctgggcaacagagcgagactctgtctcaaaaaaaaaaaaaagaaaaagaaaagaacagaaaaaccatagacatatagttataggctgctttaggtaatttttagtgttttaggatatgcttttaaaataagatcacttaaaatagtattcagaaatttctttaccatttacacagtataaaaattctgctgtgctttgtttttttttaaacaaagcacattatgcttatatctgatcaagcctttctcagatttatttatttattgagcctttttattacaaacacttttgcatatgtagaaagcatattacagtgaatacacataacccacccttgagatttggggattttaaaacactggaccatgttcgtttcagtgaattgcagtcatcacaacattttaccagtccttcagtttgtgtcttcaaaaaataaagacgtttgttctgattagataccataccatttcagcctccttgggcaaaattaacagtaatttcttaataactcttttcccatccacattcaattttcccagtttatcaactagtatcttttaccgcttttttttttttttaaccaggatccagtaaggaccacttgttgcattggattgctgtgcttcttaaatctcttctcatctgaattgtccttcacttaaaaaaaaatgctattgaatatatgaatagaccagaccagttgtcctgtagaatatgccacattctggatttgtcagattgtttcttcatggttttattgaacatattcttctgtgctgtctatttcctatacaccaaattcggctctagagacctgattagattccagttaagtgtttttcagaagaccacatcaccagccatcctctcgcctcacatcaggaggcacccagggctggttgtcccactagtagtgatgctaaatttgaattctctctgggtgttaaaagtcaggtttcttcgttgtaatgttacttccttttttctgtccgatatccccattgtttcttagatctcactgacattcagatctacagcatggctataccttctgatgacttttttttaccttgccaaaatctgcatgtttccttagccattagccaactaccggttgttttctagactatatactccatgagggatgggaccacagctgtcttctacttttctttctcttccctttcctttcctggttagtatttatagagagatgtcttattcacttctgcacacccagacattggcacagttcaggcactgagtcaataattgcgttatggatcagtactttttttttttttttttaaatggagcctcactctgtcgcccaggctggagtgcattggcgtgatctcggctcactgcaacctctgcctcccagattcaagtgattctcccaccccatcctcccaagtggctgggactacaggcacacaccactgtacccagctatttttgtatttttagtagagacgtggtttcatcatgttgcccaggctgaccttgaactcctgacctcaagtgatctgcctgcctcggcctcccaaagtgctggaattaccggcgtaagccaccgcgcccagcctagtgctttctttcttcctttattttttttttgagacggagtttcactcttgttgcccagactggagggcgatggcgcgatctcggctcactgcaacctccgcctcccggggttcaagcgattctcctgcttcagccttctgagtagctgggattacaggcatgcaccaccatgcccggctaattttgtatttttagtagagacagggtttctccatgttggtcaggctggcctcgaactcccaacctcaggtgacctgcccgccttggcctcccaaaatgctgggatcacaggtgtgagccaccgcgcctggccttgtgctttttttttttaattttttttaacttccccccctcctcttttcttgttcacagcctgaatagaaaagaacaaggaacaaaccttttggctgctttgtttcagtactataaaaatgtaaaatctaaagtatagatttctaaagtaaaattacaggtagaccttagtcttatcaagagttgtaaaacttaatattataaatgtgtctgtgtaacttggtaaatatcagctcttgaggttttatgaccaaattagctgcattctgtgttggcaaatgctaacattgatcctgttcctgattctctaattgatgacagctgtcagaattacagcattttttttttttttttagcctctatgtattatgtttggttatctgcaagataaactaaagaaaagattaaaaagtagtcttatcagaagtccataaatgttgtatggtttgcaataaggtttaactactgagtgtttattttagtaacttattacaagaggaataatgagatttacttctttgctttttaaaaataatgtctactattcacttctttcattgattcacagtattttagaagatacactgtcagatatctagcagtatcttacttttaaaaaattcataggaatttcatgtgtgtggtatttttaagaaaagtaaagcataataatcatcaactttaacaaatacaaaattaacatatatgttgtggtctccattaataaaatgctgctcaccaagtggtttaggatctcatatatcaatactaccactgaacagtgatcttttttgacaacttaaaatttaaaagaaattattctgaaagagcatgcacatttcatgaatcttgcatttataattgtccaaaatcctataggttccacgaattataggaaaatttattccctatggtagcatttctcagtagaagaacacaaatatttcccgtttgagaaccactattttaaaagttgagatgaaaagatgttcatcgtcattattcaatagggaaatgaaaatcaaaccacaataagataccccttcacacccattaggattgctatattgaaagagttggaaaataataagtgttggcgaggatgtgaagaaagtggaaccctgtacactgtgggtggaaatgtaaaatggcacagtgttatgaaaaacagtgtggttgttctggccgggcgcggtgactcatgtctgtaatcccagcactttgggaggccgaggaggtcggatcacgaggtcaggagatcgagagcatcttggccaacatggtgaaaccccgtctctactaaaatacaaaaaattagccgtgtgtggtggccaatgcctgtaataccagctacttgggaggctgaggcaggggaatagcttgaacccgggaggtggaggttgcagtgagctgaaatcacgccactgcactccagcctggtgacagagcagcgctccttctcaaacacacacacacacacacacacacacacacacacacacacacaaccagtatggttgttcctcagaaataaacatagaattacagcaattccactactagggaatgccttaaagaattaaaagtagggactcaaacagatgccagtgttcagagcagcattattcacagtagccaggaggtggaagcaacccagatgtccatcaaccatcaacaggtgaatggatagtgaaaacatggtatgtgcatacagtagaatcttagccttaaaaatgaatgaaattttgacacataccacagcatgtatgtaccctggaaacattatgctaaatgaaataagccacacacaaaagaagaaatattatatgaatcaatttggatgaagtacctggagaagtcagttcatagagacagaaagtggagcggggtggttgccaggggctgggaggagatagaatggggagttgttgtttaatgggtgcagagtttaggttcggaagttctggagatagatggtagtgatgattgcacaatagtgtgaatatacttaatgccactgaattctacacttaaacatggctaaagtcacggttttatgttatgtatatttttctacaacttaaaaaagttaatacactgtgaaatatttggtgtattatgtcagccagggtcagtcaggaatatggaagccacaccagtcatttaaaggcacaaatttagtgtgaggaattggtttgatagtgtgggagagctgggagagggagcaggcaggtaagttgggggtagtaatggtggaggaggcagcaacacaggagggtgtggttatagcgcctagagcctgggaagagagtctcttatctttcagaatgctcttctgggggtcctggaaagctggaggctggagtcagctgctacagcccaaggcagagggccgctgctgggcaaggctgataggacccggaagtagacaggggagaagtcctgccttcctccagccctccagcctcccactagtgtcgccgtcagggagcatcgatttgcagcgtcccagcctcagcatccaaagctgggctggcaggtgcttagcaaccagcgcaaacacttcttctcagtaggtggtcacttgcaccagtataccaatagaaacacagagacagagcagccctcgacatcctggggcaggattttgttattatggtggtcagccacatcctaaatatgctcatattaagttttttagaataactttggaatgaaaatgcaaattttagaattctcctggagaaatcatggactgctgtctaatacattacaaactaggtgttcttggttctcagccgagagcctgcatcagggcaccagcttggtcctgggaccttcaggacagggatggaggaaatacagaagcagttccatttatgtattaactattgggttttggtggcgtgatgtggtggagatgcatgaagtgtggtagggtgatatatacaaagttaaatgtgatagcatatgaaggatgtagagtagctaacaaactcctcacatttaataaacatgagttttctttccctctgtcatatttctaatatacaaattactttaggttcccaaagatcttcagatatcaccaagggaaatgttaaacaaggccttaatagaatctaattacagttagctaacaggattaaggagtgcagttatgcagattttgagaaattcataagtcaataattattctgttttttctgattaggaaattaagatggaatcatcatagaaaaatggaagataagataagtgtaaacaggcagaaacacatcatctctttgctctgtaacaatcgctaattgataccttgggatatttactttgtcatttgcctacaattctatgcatttaataatgctacgacaatactatcatgtattacatacttactgtgccagacattgtgctatgcacttgatcaggattatgtccttgaattctcataatcgcctgtgagttggctcctgttattatccccttgtgacagatgatgaaactgagacttagagagtttaagaggcttgctcaagggtaggactcactgaagcttaagagcctgagctctgcatcattgcaccactctgaccctccagctgagacagattatgtgatatataaatttgtgttctaatgttttatgtaattgtatagcatgaacatttcccagtataactgaaattcatgattaataattgttaaagctgcattaatagtttctatatggcttacccatcatttgcctaagagtcctcaggcctgacattttggtgctttttctgttatgggtaataacttgggctttcagtgaaaaaaggttcatttcgtatgtataccaatgaagtaatacagtgagtatcaatcatgtttgaggtttatatgacaaatttatggttaattttgttttgagcatcttttgaaagaggaatgttattaacaggtacatatataggaatttatagatatgggttatagcatttttttcctcatccgtgttatttcatctgcttttcccagcagttctggaatgcgagtgatcgcctctttgcaggtacaaaaatcacggcacagagtaagcaggtcacaggcttgcccagagtctacggctgcaggtgctcaagctaggcctggaaaccaggacctctggttccctctacaccgtgccacgctgtctccttgtctttggtctccaattattgttttcctttgttctgactttatggggagactggcaagagctcttgcaattccctcctgatgttgggagtgttcagattctagccctttccctcttgttctgtttgcctgctcagtagggtcctctcccctatgaatccagcagggtattgacacttccttcatgcttttgtagtggctgatagaattggatgctacctaacgtgttttttttttttttttttttgatcaagaagcaggaaaataaatcagttatctcctattttccttaaaaaacttttaaagccggagaacatttcagtgggagtgagggtcagatttgtgagtaaaaatgtataatagtcttttagaagataagatctgttttgtaaaaaagggaagttccctatggcattgaaaataaagctgccttttggagcagtgctttattttatgtgtaggtttaattaggaagtagcactttgttgtgggaacataatcacagaggggcctttgttttatgcaaacttttagacaagagctgcttgtgtgccgggttttgtgaaacctcattaattcagatgtcagttgttttttcccccaaatttctgaaaaattgaccagtactgggtgaggtttataattatatcattcaaatataaagtgtttattaagcacatcgacaaggtcaacaagaaaatagggaaatttcacattcttaagataaaatctttaaagatttttattgcaagaattgcatctaaattggagcgtctcattacaagtgaattttggctgttcctggaaagagattaggcagaaacccttcctagaagcactcagatagaaattacttttactgtatgctttttgtactctaatgattctattccagttttctattacttcatactggcctccaccaatttcaaatattaaggtttcttgaatttgcttggtaaaataaatagattggaagaagtcttaagctcatcattatgatttggaagtaagccaccctaaattcctgtccttcagacatttttatctttgttgtcatgttctctgtgaagctactagactcagaaataggtcttttgttttcacattttcattatctcgttttattttctcatgcatagcttctctgctggttatctatcgtgtaagaaaccactgtgaaactttatggcttaaaacagcaacattcattttatacctttcctgatttcagtggggtcaggatttaggaaaggcctgagtgggtatgtctaaggctgcagaccatggggggctagacttggagcagcttaggggagaggttctctggggcagctggaggagggggtttggggaagctggggaagagggtgccagaccagctgggagaaggttcctggggcagctggaggctatgttcatgagagttcagggcttctccgtgtggtctttccacatgggtgcctgagcttcctcacagcatggcgactttaaggcagcttgcttatagggcagcttggggcaggaggcagaagttgtgtcccctcttagacctggtctccagtcacacacagtgccagtttccctgtgctgtatgagccacccagtcactcaggttggcagagattcaacttgggaaagatagaccagcctcacctgtcaaccggaggaggggtgaagaatttgaggcctgttttaaaactgctactgcctcagccttctgaaagggtctttctctaggaggctttaatctttgcagccttgcatatcttatcttgtaggggccgcacccctgtctttaggtgaggtgaagagcttataggaaccaaacaggaatgcacatactgttcttttaacgataagtgagctgaataagtgaaaacaattgaggctaggctttaggaacaagatggagttttgtttcttgatacgatttatatttaagctttctcacttatgtattatcggtggggattgccaaacagtccaggataaccattttgccatttggcagagctcagttctctttagattttgagctgccaaggtttggctgcactatttcagtgtttctacccagcagggcttcctgcatttggcctgggaggattcagggaaatccgtgaagacagttttgcaggattggatcacaaaatgcttttcatatccccaactgttttggcatcaaagtaaagatttttgtatatttatgggaataaagggaagtccgttctgaaattatttcttccgttatattgaagctgaaaaaaagggataagttttaatttctcaagaaatatttctttgaaaaatatagtgcagtttggtatccattctagcttttttttctttttatgtattgacttaacttctactcagattgtagtatttccatctttaaaaacaaagctgtaacaacatttttaaaacatggcttataaaaacctcagctaggtctcagaatatctcttgtgtttttaatgtcttcagtgaaccttttctctacacggaacttcctttattttgatgtactagtaacatataatagcagaaagtttttaaactatagaaaaatataagaaaaaagttattttaaaaaatcccctgtgattcttacaatcaggggtgaccttttgctccattgcatcatatctaagaacactgaatatatttaagaaatcacggaatctctgccttgtgcatactgggatctcaggattcatcgatgaacaagacaatgatcggattcacattaagcccttagtgcaaagaaagtggacaacacatgggcggttccttcagtatgttggttattagcagtgatgagcaggcttgctttcattgcatctttaaaggcaggccccagctctcaaggggcttctggtctggtggggaaaaataggcttctgctgagtggtgtagagtgtgcagggaccgggggtgcacagagaacacatcagaaggaccacttcgtggctcagagaaacaatgcaggccgggcgtggtggctcacgcctgtaatcccagcactttgggaagccgaggcaggtggatcacctgaggtcaggagatcaagaccagcctgaccaacatggacaaactctgtctctactaaaaatacaaaattagccaggcatggtggtgcatgcctgtaatgccacctactcaggaggctgagccaggagaatcgcttgaacccagggggcagagtttgcagtgagccaagattgtgccattgcactccagccggggcaacaagagcaaaacgccgtctcaaaaaaaaaataaaaatgcaaaaaggacccactggaggaagggaggcaggaatacagaaggaagaagcagcaggaaagagcagggtgggaaagacctggaaattagaaagcctggcatgtctgtggtgctgacatagtacattcagtcctagaataaacatttcctctcgtttttcttttctatttattgggacataattgacatatagtgaaatgcacagatctcgagtgtatagttcggtgagttttgataaatacagacacttgtataagccattcccttgtcaaggtatagaacgtttgcgtcaccccaaaaggctcccccacccccttcccagccaattccccacttgctctcctccctcccagcagccagaggaaccgctgtcctgaattttttttttcactttggaagagttttgcctgtgagatgacttcttattaatggaatcacagtgcgtccttctttgtgtctggcttctttctgtgagcatgaggtttgtcagattcacatgccgttgcttgtatgagtggcttgttccattcatttctgtgtagtaatttcactttatggatataacaacatttatttatccactgtcttgcggggtatttccagtttttgtctattgtaaaaatgctgctgaaagcaaagcaatcctgggctcttctcccaggagtcactgtcccgtgctgcctgctgtccaatatttgaaacccattctttatatcctgtgtccagagttctagctgttcactggaggagagccaggtggtaccaatttcttcttcctagcgaccagcaaaatgcctgtaacaatttgtaatggcagaatgatattttatcatttggctacacaataattcatttaacctgttcccattgggagacacttaaggtgtttccaatttggggctattctaagttatgctgcaacaaacatttgaatatattatggctgttacggtaatttattttttagtgtcgattccaaaaaattagattatttggttaaatgcttaaatttttaaaaatgtgatctttattgccttatttttttcaaaaacattgctcaatttataggctcagtaacagtgataaagtgtgtttcacaattccttggtagtatagagatcagaattttcttttcttttttttttgtcctatgctaattgaatagcagagaatttatttgtttataatgagttgttacattatgtcactactggacatatctttgggaggactaagctaaattcagatgcttaaacaatgtttggtctgatttattatcttcacatgtgtaaattttatgattattaatctattgaggcagtcaaattgctataacacggtggtgacatttttagatattgaatatcaatattagaggctggacagacttttcaagtcatattctaaccaaagagaaagaaccgatttgactctaagtctcattcttttgagaagttccagttgtcacaagaataactatggaacattggaatattgattaaaaatctgataccttacctctgtattgtgcattttataaagtgctttcctattcattatttcgtcttatgcttacatgaaaaatctgaaacatgtgtcgatttgtatccacgtcattcacgaatatgcactgggatgtagagaatacatcctctggatttgtcgttttaagcctaaatcatggaaaacattcaatgtagttttaaagttctctaggctataggaaattaaaaatatattactcacctatcactacctttttgcaggggaatatgggtgattgtggaattctaactctgaaagcattggttttggtgaggtgaccaggctgccaaagtgcactgaaggtagagacttcttagtgactgggacagctgcctgttgatgccgtgcacctcctcaaacctgtggtctctttgcaatttgtatgcaggcacatagaaagcactgactcgctctggcctgactgtttcggaaatgaagctaggaaaactgtgaggtcaaatttaaacctgcaaataattagctggatggcatagctgtacaaactgagatagcccgggaaatttggtaaagctttaaaactattatacttattcgcttctgttcagccaactgggctgatttttgagacagagtctcactctgtcacccaagctggagtgcaacggtgcgatctcagctcagtgcaatctcagcctcctcctttccagccattcttgtgcctcggcatcccgagtagctgggactacaggtgcgtgccaccacacctggctaatttttgaatttttagtagagatgaggttttgccatctgcccaggctggtctcgaactcctggcctcaagtgataagtaattcacctaccttggcctcccaaagtgctgggattacaggtgtgagccaccatacctggccaacataagctttcttatcagttgagaattactagaatatgtgtaattgttttcttgttttaaaaaataatagactattttttagagaagttttaggtttacagaaaaattgaatgtaaagtacagagaattcccccacacccctctgtacaatagtttttggatcaaattttggctagtggtttttttttttttttttttttgagatagagtctcactctgtcacccaggctggagtgcagtggcgcaatctcagctcactgcaacctccgcctctcgagttcaagccattctcctgcctcagcctcctgagtagctgggactacaggcacgtgccactatgcctggctaattttttgtatttttagtagagacgaggtttcacccttttagccaggatggtcttgatctcctgaccttgtgatccacctgcccccctcccaaagtgctgggattacaggcgtgagccactgcgctcggccttggctattcttaatcacccttttaagagcaagtgactgatccagtgcagttcaacggtttctgagaccttttcctccatagtatttacaagacgatcatgagaattgtcaatcatataatttaagaatttttgcttttcctactatttaatggtatgtaatcagaagatatttatccgtgttcttcatatgaaggaagcacaaaaaatgtcagttaaataaccacttagtaggtctctagtgggatgaacaatatttaggatcatttacaactttataccagtcttgtatcagtcttatagactgagccaggcaagaaatggggctgcccgaacttgctgttcaggaaatgccaccaaggaggaaagcattgtgtgaacaatgggtctttcactgtaaagccctgagtttggggctctgattttgtattttgtgaagtatcatcatgccttgccagagctcagtaagaatgtgaccgaaatcaggtcatgagaaagataagatttcaaacatcccctcggagctgtttgcttgacctccgctgacttaattggtttctgtggagttggcccctgcctagaaatactacattcctactcattttcaacttagacagctcagtctttcacaaggttgaatcttcataccattcacttttcatctcttttttttggagggggtgttgttataaaatatgcatatcataaaatttaccattgtaacttttttttgtataaaaacggcatattctctattttgcatactttaatttcagaacaaaataaacaaaaaaaatccacaatacacaacatccaatcctgctgtcagagtagggagggaatgggggcttgacacccttgtttcctgccttcaatacaaagacaggagagaaaaaaacactagacatcagcagggggagccaggtgggacaggggcacttgaggctgcagtgggagccattttaaccatttttaagtgtacagtacagtggcattaggtatattgtgcaaccatcaccaccatccatccccagaactttttcatcttcccaaacagaaactctgtaccccttaaacaccaactccacgttcctctcttcccccagccctgggtagcctccattcagcttttgtctatgaatttgattactctgggtaatcaagcttacataagtggaatcatattctatttgtccttttgtctggcttatttcacttagcgtacataatgtcctcaaggtttatctatgttgtagcatgtattacaatttccttccttttaaagactgaataatattccattgtatgcatagaccatattttgtttagccattcatccatcgacgggtacctgggctgtttccaccttttagctattgtgaatgctgctgtgaacattggtgtacatgtgtgtttgagtccctgctttctcttcttctggatatatacctggaagaggaatttctgcatcatgttgtaattctatgtttaattttttgagggaccaccatactgttttccatagtacctgcaccattttacattcccacagcatcttttaaaaaaataaacaaaagccttcctatatattatgtatcctacatatttggctattctcttttaaaaaataagctttaaatattatgatttgtcagttagatactcaatgaagttagatgtgtctaaagaaaaaggagaatcttcaagtagaatatagaccaaggatccatacaaaaagtgaaattttacacactcacaaaaagcaatactttctcatctctctagtgctaaaactatcaacgattcagctagatttagggcccgaaggaaagaaaacacataattattgtttctgggtgttgtaaatgtataactaataggttaatgtttaatggagttcgttaagtacagatttgcacagcttttctgggcagtatcacctgttggattttagaggcttaatgattaagggccccttttactgtcattgggtgtgatgctcgtgtgttttctcataataaggcatgagaagaagggatgcaagctgtaagctcttcaccatcgctccatcaactggggcaaaaacaggtcaatgtgaggactaggagaagaggtgaaaagacgttgaatttttagccagatattctctgggactgaggcaagaggggggaagtgtgggctttggggccatgtaggagagaactctgcactcttcctatagtggagagagggatctgatcgagctggaagaccctgcttggcctctttgtgttttccttctcactcatgttttggccttttagaaaaccctgtaagacccattgcttttatctctgctctggtctcttggtgtttacaaagtcagcaccaccatctctcatgatttccaggcaccaacatccaatcctgtgaccttcagccccggtgaccctgtagctccttggtttcaggccctgggatggtctaagggttttaaccacggtgcacaaagatctgcctgatggccgacagccctggccaggcgcccaccggctctctcctgccatctctgcactccttcctctgtgctctgccctcagagttcccctcagtgtctttcctcacctttgctccagttacctggacatctctcatctggcttcagagataccttctcttaccttcagggaagacttccctgactatctgccttctccagacttaatgggccttcccccaacacccagacactctcacagcctccacccttctccctggtgacttggtcagcctctggctttcccaccagggcattgggtcacatagaccttccatccactgccatatttgtggcacctggtttagtccctgtgacaaagcagatgctcagttaatgatgactggacgaagcttcagtgaaaaattgttagtgggcgtcccttgtccccagtgtcctgtgtccatgtggagtgttcctttgcttacccctcccccacctgtcctcaagggaggagcagtcattgcctaactcggggacagctgactctctcccccagggcacagtgtgctcttcttttcccgtgcaggctgttctcagacgcacaggtactggcccacaggacagagcttccagggtgggtccgcaggcacccactcaggctgtgacgcaggagggagtgtgtcaagcaggcctccaccgcgcccatctacatcatatcctccagttttgcttttttatggaaaattgcagactgccttttccaatctccatgacagatttgtgagcctacttccacatcagaagaggaaggaagggatgccattcattgccaccactgtcccaacatgaacaaatggggaacagcattttggagaaagcctagtgtgatttcaaaggcttagatggtcctaggtgaaaacttgatagttaacggccaagggaatcattaggggttggggaatagaaaaggtgctttttggatttcttgggtctgagaatggcctgtaactgcatttcacaagtgggtttatatcattctaggggcacttggctgtcacgtggatcttacaaggtggggaaaagaaatgaagatcctcacaaagagcatttggtgacatgcctggctgtggttttgaggctgttccagctaattttccacaaatttagcaaaatcaccaagaacacctcgtcaacttgagcaacaggaacaattatagggagaaatacatcgagactaggaatggaagacaaccttttacttgtctgttctgtttcttagataaagcagttcaacactttttgtgggggatgagggacagggtcttgctctgtcatccaggctggagtgcagtggcaccatcacggctcactgcagcctcgacctgccaggctcaagtgatcctcccacttcagcctctccatggctgggaccaaaggcatgcaccaccatgcctggatgattttttttgtagtttttgcagagatgaggttttgccgtgttgcccaggctggtctcaaatttctgggctcaagcagtctgcccaccttggcctcccaaagtgctgggattacaggcatgagccaccacccccagcctgcacactttttaaaacaacaatactattagtcaccctcaaatggaaatggtgacacctggaccatgggtcagcttgcggggtgggctccttttgaaatcgcttttctaattgatggaagtcagaactgcttctgacaggtgtttgaagtatttctttcctatcttcagattaccgatcatgggttactatttacgttttaaatcggctcgtatctgtgtgccctctatttgtcagcaatcatctctcttactttggcttttcttcaatgtccactttaagtatctcagcatggttctgaagggagcattcctagattgtctgagacatgaattttaagaattttaaggaaagaaatctgcttgatctaaatttatcactattggcagcctgtccctcctcccctaatcaaaacaaaaagcaaaaagaaaaggagcaaaaaagagaaaagttactggacaaggacatattttgttttgttttaattttgggacatgtttattttgcacatctaatggtagcatcaaatttaaagagaaacaaatcacgttttattctgaaatgttcttcttgtttatgaagctgtttctttttgtctgttaattgagtatgctgctcctaaaatgagataacagttaaaactgccaactgaaatataatataaatgacatttcaagtaattgctctgagaaatgtatttaaaatgtgtattgcagacatccttccttccctctcagctccctagcatctcagtttttcctagtttttgttgccacttcacgtgctgataattgactaagtgctttcgtgattgacacgctataaaactggaagtgagccatatctgcattagtaattagcctcctattaaatcactgcttctttattcatgagtagtaagtgttaaattcaaatggtcattttacatttcattctctaataatttcatgagacataaatctcacagagcacaaaatcgccactttcacagggataattgagcaatattatttatcaaatgcacttaactgttcatctaaatctcttttgtctgggaaaagttcatttccttcatgcaagagagaaaacatgccttcattcactgttcagttaccaccgtggaggcaggtaggttcttctatggagaattttcagaccggagtcatgcctggtattgagccccatagatttcctgagagcctgcggagaacagctgcactttctgtggagaggagaggcttcacttctgtctgcacatgggaagttgacctctgatgctggaaaattaggttatctgtattttttagacatctgtgcctgagatggatttaatatatttaagttaagattgaggcccacatgaacattcctgtctggattcctttttagaaagtggcgtttgatgtgtgcctactttatttatgtgacactgtttatgtgcattccagtgatcattaacaaaggctacttggtggaaaatcgtgatgaaagtggatttaaaaatggctgtatcagccgcaggtttagcaagactacattgactctgagtctagtgagaacccctgcatcatcaatttgtgttcagccaaccttaaatccagagaaaaggcagtttagtcaaccatgcaaaaaaagggcaaaagaaatattgtggactttattgggacaagggtttaatattctatgtactggccaggcacagtggctcatgcctgtaatcccagcactttgggaggccgaggcaggtggatcacctgaggttaggagttcgaggccatcctggccaatgtggtgaaacctcgtctctactaaaaatacaaaaattagttgggcatggtggcgggtgcctgtaatcccagctacttgggaggctgaggcaggagaatcgcttgaacccaggaggcagaggttgcagtgagtcgagattgcgccattgcactccagcctgggcaacaagagagaaactttgtctcaaaaagaaaaaaaaaatctacatactaacagacaatccttcagtttttctacattacatataagaccaatttgtcaacacatgattggtgaattcggcctgtattaatcaggtgagactgctgtaacaagtagcaccaactgggcagcttaagcaagagacattgatgtcctcacagttctggaggctgagtctaaggtcaaggtgtcagcagagttggtttcttctggctcatagtggcttcttctccctgagtcctcacatggtcttccctctgtactgtctgtgtcctaatctgcttttcttatgacaccagaaatattcaaatagggcccactacaatggcctcatttaacttaatcacctctttaaagagcctattgccagatacagccatattctgagctactggaagttaaaacttcatgtatgacttctgcgggaaacagttcagcccataacagggcaaagtgaagacaaattgtatttaggttcttcatagcaccctttgcctgtttatcagacttaccactctcaggacccctagtttgtttcctggtctccagtttggggaccttgaggactattgagagattgtgggaacaatggcccaacatcctaaggaagtctttgatcaagataaaagttaagtaactcctcccttgagagcttgtcctgaagtttttcactatggctgttcttccatttggtatcattttcttatatatgactaagctctcagaataaaagctggcaaaaggttggtaaaatactggaacatggtattgaaataattatgtgctgggccaggcgcggtggctcatgcctgtaatcctagcactttgggaggctgagatgggtggatcacaaggtcaggagttcaagaccagcctggccaagttggtgaaaccctgtctctactaaaaaaaaaaaattaaaaaatattggccgggcgtggtggcaagtgcctataatcccagctactcgggaggctgaggcaggagaaccgcttgaacccaggaggtggaggttgcagtgagcggagatcacaccactgcactccaacctgggtaacagagtgagactctgtctcaaaaaaaaaaaaaaaagaaagaaataattttgggctggatgcggtggttcacatctgtaatcacggcactttgggaggccaaggtgggtggatcacttgagcccaagagttcaagaccagcctgggcaacatagtgagaccccgtgaccatgaagaaaattgaaaaaaatcagccaggcatggtgtggcttgtctgcggttccagagatttgggaggctgaggtaggagaatctcttgagcccaggaggtcaaggctgtagtgagctgtgaccacgccattgcactccagcctgggtgatagagtgagatcctatctcaaaaaaaaaaaaaaaaaaaaaaaagaaagaaaagaaaagaaagaaagaaatgacactggttaaagtgaaagggtggaaaaactggattagggcttatcagttgtctcagcctgggacttctttccttttctttgcaatatatagaagtagtgcagcatagtgcttaagagtacaaactgcctgggttcaatccctgctgtatacagtttagcacctgtaagatcctgggaagattacctaacctttctgtgctccaatttcctcatctgtaatggggggaaatgacagtacttacttcgtaagaagaatgttgttgtaagaattcagagttgttggggcatggtgcctcatgtctttaatcccagcagtttgggaggcatggatcatttgaggtcaggagtttgagaccagcctggccaatatggtaaaacctcatctctactaaaaatacaaaaattagctggacatggtggtgtgcaccagtaatcccagctactccggaggctgaggcaggagaatcaattaaacccaagaggcggaggttgcagtgagccaagatcatgccactgcactccagtctgggagacagagagagacactgtctcaaaaaaaaaaaaaaaaattcaaagcgttaataatcctgatgaagcacgtggcattggtactggccacagtaagtgcttcgtggcattagcattcattaatctttgtttcttgcacactctccatcctgttcccccacccaacagaataactggaagagctgccactatgcttaacatatgaacccggtctccaagtgaatgtaggaatctttttgtttgtttgtttcttggcattacaaaaataaagttcagtgaccctaggtgtgtgtggacatttgggggcaggcagcacgcagggtggcagaagggttctggagctgacaccacctggtttcttttgggacctgcaactcagtagtttgtttcttgacctctctcttcatcagtttccaaatgtataaaatgggcacaaaaacaataatgggattgtttgggattaaatgtgatgatatatgtataaagctcttaacacgcacgtggtaaacttgttagttctttccatattcaagtgtgaaactggaagacaaagtaattacattctgtttcagatgtctttgtaaatgaccttgccttctctccctccccaatgggctgcctgatcaccctggctcatgtggcgcctctgcttcgtgaagtcaagtttcacaggtgcagcagtaatggatgatcacaacccacatattcagttcaacttttatgatgcaaacatttacaaaacagttggacagtgatgagtagctatgaggatgttctccgttgtcctccttgtcaaagccccgaacacattatttcacttctctttttttttttttttggagacagagtctcacactgtcgcccaggctgaagtgcagtggtgcaagctccactcactgcaagctccccctcctgggttcacgccattctcctgcctcagcttctcgagtagctgggactacaggcgtccgccaccacgcccagctaattttttgtatttttagtggagacggggtttcnntgtgntagccaggatggtctcgatctcctgacctcgtgatccgccctcctcggcctcccaaaatgctgggattatttcgcttctgatgtgctttagaaacagccattgtcttcgaaaggaaagtagctcatgctcagagatagccaaaacatctgacacgctgaaatcactcgcagactgaagtcgattggagaatgtttctggcaggtggaaagagtgactataatgagatagaattgttagtccttattgattctgtggaattccagaatcagggaaaagaaaaacaaagaaataaaacccaagaaaatccaggcaataagactcagtaaattaacaacttccttcccaagacatacacatatatgtgtatgtgtgtgtacgtgggtaaatttttttttttttttttttttgagatggagtttcactctgtcacccaggctgggagtgcagtggtgcgatcttggctcactgcaacctctgcctcccgggttcaagcaattttctggcctcagcctcccaattagctgggattacaggcatgtgccactacacccagctaatttttgtatttttttagtagagatggggtttcaccatgttggccaggctggtctcgaactcctgacctcgagtgatctgcccgccttggcctcctaaagtgctgggattccaggcatgagccaccgctcctggcctaaatttttatatatacatatatatatttacacacacacacacacacacagctgacccttgaataacttgagggttgggagtgccaactcccaatgcagtcaaaaaatccatgaataacatttgacttcggtaaaagacttaactactaatagcctattattgacttgaagccttgctgataacataaacagttaccacatattttatgtgttgtatgtattgtattatgtattatatatgtatttatgtgttgtatgtttatggtataaagtaagctagagaaaagaattgttattaaaattgtaaggaagagacaatactatatttactattcattaagtggacgtggatccatcaaggtcctcatccttgtcgtcttcacattgagtaggctgaggaggaggaggaagaggggttggttttgctgtctcaggggtggcagaagcacacaaaaaaattagtttataagtggacctatgtggtttaaacccgtgttcttcaagggtcaactgtacacacacacacgtttagaggtccatttacacacatgtattgcatggctattttacaaattaaaagtactggacttggtttttaaacaaatcacccatatccatccaggttagaggaagtctggagtcagtagcagttcacctggagaaaggcattttttgtgttttgttgcttgttaccccaacctgagttagtaatctaagtttactctcagaaaagtgaatgcttgctaaggctgaataactaaaataggggtgtgatattttcactacgttcttcacaattcagaaaacatttagagttctctattcaattcctgggagccacattttaaaataaagttgtgtccagagccttatgacaaggcaaggatgtcttgttaaatgatgaatgttttcaggaaaccagaatattgaggataaaaacgagagattctggaggtgatatatgatagttatgttcagatacttgaaggacagttacatgaaagtggaatccaagatcttttctgcagctccagcatgtcgaatattatgggggagcttgaatcaatgtaaaaaaagattatctggccaggcacggtggctcaaggctgtaatccaagcactttgggaggtcaaggtgggcagaccacttgagcccaggagtttgagaccagcctaggcaacatagcgagaccctgtcacacaaaaaaatacaaaaattagccaggtgtggtgctgcatgccactctggaggccgaggtgggaggatcccttgagcccaggaggttgggactgcagtgagctgatatcgtgccattgcactccagcagcctgggcaacagagtgagaccttgtctcaaaaaaaaaaaaaaatcctctaatgagggagttgtcataaaacaaaaggactgtcttaggagctaatgaatttcctgtcactggaagtacttggagaaggcctggggtttttggggagataattccttctcagttttagattttgggctagatatctaccagggtcccttccaaatccaggatttgtctggctagtttcctcctgctgctaatagtcatctacattcatttttttcccccagtttgtttcctcattactctggcttttaatttttttcaattaatagacgtttttggaacagttttcagtttatagaaaaatgagcagaaagtacgaagttccatactcctcactctctcccttccctccagttgctcccactattaccatgttgcattaggatggtacatttgttatcattgatgagacaatattgatgcattattattgttgagtccatagtttacatgagggttccctcttggtgttgtacattctgtgtgtttagacaaatgtgtaatgacacgttcccaccattagagtatcatacagggtggtttcactgccctaaaaatctcctgtgctccacctatttatccctccttccctcgccctgagacgctggcagccactgatctttttgctgtcttcatagtttcgcctttgtcacagtgtcatacagttggaatcatatagtacgtagccttttcagattggcttctttcacttagtaatatgcatttgtttgtttgtttatttatttatttattatttttgagacagagtcttgctctgttgcccaggctggagtgcagtggcacgatctcggctcactgcaacctccgcctcctgggttcaagcgattctcctgactcagcctcccgagtagttggactacaggcatgcaccaccatacctggataatttttttgtatttttagtagagatggggtttcactgtgttagccaggatggtctcgatctcctgacctcatgattcactctcagcctcccaaagtgctgggattacagacgtgagccaccatgcccagtctatttatttattttttgagacagagtttctctcttgttgcccaggctggagtgcaatggttcagtctcagctcactgcaacctctgcctcccaggttcaagcgattctcctgcctcagcctcaaaagtagctgggattacatgcatgcgcctccacagctggctaatttttttgtatttagtagaggtgtggtttcaccatgttggtcaggctggtctcgaactcctgacctcagctgatctgcctgcctcggcctccgaaagtgctgggattacaggtgtgagccatggtgcccagccattttttttttttttgatacagagtctcactctatagcccaagctgcagtgcagtggtgcaatctcagctccctgtaacctctgcttctggggctcaagtgattctcgtgactcagcctcctgagtagtggggattgcaggcgcctgccaccacacgcagctaatttttttgtattttagtagagatgggattttaccatgttgccctgggtgttctcaaactcctgggctcaggcgatccaccagctttggcctcccaaagtgctgggattacagacatgaaccactgcacccagccagtaatatgcattcgaggtttcttcatgtctttttgtggcttgagaattcatttctttttatcgtaatattccatggtctgcatgcaccatagcatgtgtttctatttacctattaaaggacatcttggttgcttccaagttttggcaatggtggtgcaagtttttctgtggacctaagttttcagttcatttgggtgaattcccaggagcatgattgctgagtatggtgagcatttttattactgagaatggtgagcatgtttagttttgtaagaaactgccaaactattttccaaagtggctgtaccattttgcattcacaccagaaatgaatgagagttcctgttgctccacatcctcaccagcatttggtgttgtcagtgttttggattttagccatgctgtagatgtgtagtgggctgacttttttctcaattttagatgtgttatctccaaatcactatgaaaaatacttttaacactactattaatgtaacataacactagtatctttcaagatccaaataaagacattggaaaccagaacaagctcttatgttcatatcaatattgttaataataataatactacatatttatttgtgagtactttttgagtttattctgaaaacaaatgctgctaggagattattcacaagacacatttctgattaacatgtatgagcagttatactccaaagcttcgattttggcaaccaatgtttaccagttctctcaaggtgcacttttgtttttgaacagttgctactgattctatttttttaaaaaattattgtgtatatttaaggtgtacaacttgatttgatatacatatgcaatgtgaaagaatcatcacaatccagataattaatatatttatcacttcacatagttacccttttgtgtatatgatgagcatacttaagatctacccttttaataaataaatttctagtatacagtacactattgttaccatccattatatctccagaacttattcatcttgcataactgagacttggtatgcattaaccaccatctccctattcccctctcctcgcacctcatggcatccaccattctactgtctgattctaagttcaactatcttagattctgcctttaagttagatcatgcagtagctctcattctgtgcctggcttgtattgattctggattgagacttttcagtgtctttgtttcaggtctttcaagttgcatatgtcatcattaaagctgccaatgcccctcgacctggaaactggattttggagcgttctctggatggcaccacgttcagcccctggcagtattatgcagtcagcgactcagagtgtttgtctcgttacaatataactccaagacgagggccacccacctacagggctgatgatgaagtgatctgcacctcctattattccagattggtgccacttgagcatggagaggtaggtatggtgcccgctgcagcaagatctgtttcctcatcagagtctccctgtctcagatgttaagacagccattgtcatggccaacattaaagactcaaaattgatctctctcaatacaaagatctttaatataactatctagctctatttaaagtggccttgagtcatgtctattataagtaatttcacgaacaatatggtttaccttgttgacttcctctcttcaaggaggctctcagtcttcactctgctgtgatttaatgacgcccttggatcctccttcagagcatcttccccacagcaccagggcaagaatgtttgttgaaatattagagagctaaaatgtcccccaaagttgtagttcccttttctcagtgttctcctcggtaggtggtgagcactggagactcttgaagtcttgcagcttagtgcccaacatgcccagattgtatacacttccttaaagtcagagtataatgagaaacagcccattctttagtagcacctggcttgatgagatgaaactacaaaaattctccagtgctcttcacagcgggaactctgcagcgagctgtgagttgtttcaagggcagagattaattaagacagcctgtatcattcaggctttgtggactttttctttgttcttctcgaagcctattcatacataacattttaaatttgcttcagagaagttgtagcccagggacagatgctgaaatattctaaccacttggagagaaacggtcctcttaaaagattttcagcaataatgccataatgtgatgaatgccggagtctttgttcttcacattgtagtctggttccacatctgatctttggcaagtgagggttttcttttatatcaaattttaaagtttgagacataatttacattcaggaaaacatacagattttaagtatatagtatatctgagacagtgaaatagataccttcaataaactgaagacattgagatcatggtaattcacaagtaattaacaaatgttagacatatttttacaagaagctagttgttttgttttgattttagatggtatctctaaaagattctgtcctgacattaggcaatcagggctatatttttgcatgcttaaaattgacatttgtggccaggtatggtggctcatgcctataatcccagcattttgggaggccaaggcaggcggatcacctgaggtcaggagttcaagaccaacctggtgaatatagtgaaaccctgtctgtactaaaaatacaaaaattagctgggcgtggtggtgcacacctatagtcccagctactcgggaggctgaggcaggagaattgcttgaacctgggaggtagaggttacagtgagccaagatcgtgccactgcactccagcctggaccacagagcgagacgccgtctcaaaaataaataaataaataaacagttgatattcgtctattttgatgccttcatcttcagattcatacatcactcatcaatggcagaccaagcgctgacgatctttcacccaagttgttggaattcacttctgcacgatatattcgccttcgcttacaacgcattagaacactcaatgcagatctcatgacccttagccaccgggaacctaaagaactggatcctattgttaccagacgcgtgagtatgggacggcagtcctgccaaataaaataaaaagattcattttatttaaaggaactattatttttcttctttcctttttggttgttctttcccccacatgttggccttttttcttgccagcagctgtatccttatttcatgtaagattgctatgttgttacagatgctgcctttaggtgatgggccaaaatcatatcctcaggtccctcacccaccccgtccccatagtgccgtaatgtggtgaatgtcatggtctttgttcttcacatcatagtctggttccacatctgatcttcagcaactgaggattttctttcatatcaaattttaaagtttgagacataatttacattcaggaaagcgtacagattttaagtatgtagttaagtgtgtaagactggtgtcgcaaaaattttcatatcccttcaataacccaggagtgggattactaagttatagggtagctggatgtttacctttttaagaaaatactaaacatataaaaagtagttgtatccagctgggtgttgtggctcacttgtgtaatcccaacactttgggaggctgaaatgggagggtcagtggagcctgggagtttgggaccagcctgggcaatagagtgagacctcaactctgtttaaaaaataaaaataaaagtagttgtatccgtttttgtagtctgaccagcaatgtgtgagagttctggcagcactacacactgttagatatttactgctatcagtcatttttatgctggctgttcctgtgtgcgtgtattggcattttgtgatgttaatttgtgtttctctgctgactaatgttgacagtgtgcttactagtatacgatcagatttttttttgtccatttttaaattggacaaaaaataagcctcgttactgacttataaaagaattttatatattttgtatacgaatccttcatgagatatgtatatattgcaaacatatccgttctacttggtgtttgcttattcaccttcctgtgactttggatgagcagaggttttgtgacgaatcccaatttaccattttttcttttatggttaatgctttctatgacctcaaaaaatattagcttatcccaaatttaccaagatatcatggtaggctttcttttagtagctgtatagttttagcttttacatctataattcattttgtattaatttttgtgattggtgtgagggaggagtcagagttttttttgtttttgtttttttttcctatatgtatatgcaattgttctagcaccatttgttgagaatgctttacttgttttggggccgttgttgaaaactattcaaccttattattgtgggtttatttctggactctctactattctatagatctgtttgtctattcttgtgccaataacaagctttcttggttactgtagctttacagtaggtcttgagaggtcaggtttcttgtatttccttatgaattttagaatcagtttgttaatttctgcaaaaaaaaaataaagcctgctaagattttcactgggattccattgattctttagaccaatttgggaagaattttagaagacattttaacaatgttgagtcatccaatctgtgcacctgatatataacttttcacttatctaaatcttctttaattctctttggcagagttttattgtttatttgaaaaggtcttgttcaatagtgctcaacaatgttcaataatgaaaaaagaaggccgggcacagtggctcatgctgtaatcccagcactttgggaggccgaggcgggtggatcacgaggtcaggagatcaagaccatcctggctaacacggtgaaaccccgtctctactaaaaatacaaaaattagctgggcgtggtggcgcatacctgtaatcccagctactcaggaggctgaggcaggagaatagcttgaacccaggaggtagaggttgcagagagccgagatcacgccattgcactccagcctgggtgatagaccgagactctgtctcaaaaaaaaaaaaaaaaagaaatcaaggcacacatagtaagactaaactgttattatttgtagatgacatgattatgtatgtagaaaagctacaaagcaactaccagaaataacaagtgaatttagcagtgttgcagtatacaaaatcaatgaacaaaaatgaatcacatttttagtcactagcaatgaacagtggaaaatgaaatctaaaaagtagtctattaacaccaacatgtaaaaacatagagaactggtgagtgcattgcttcagaggaaagcactttgttctgttaatgtgatttacatttcttgatttttgtgtggtagattaactttgcattctagggtaactcttacttgttcatgatcttttctatagagtgctgtattcaattagccaattattttacggttttcaataatgagttttgaaacattactgacttggtttaagatgcagttggggaattcttttagacttctctgggttctgatgagctaatttgaacctaatttattttaattgagcacaggattctttgtgcatgaaatataatttttaaatgtacatgtaattatattttagattaccaataaaaactcttaaactacatgagatatttgttggtgtgccgacattttcatttcactgaaatctaggttttaatttttgttcataactttctttttccttagtattattattcaataaaggacatctctgttggaggcatgtgtatctgctatggccatgctagtagctgcccatgggatgaaactacgaaggtgagttctagtattttacattttactaaaacttcaaaacagaaattgtagctataatatttgcattactgttttttattccaaacaaacatgaaaggtataaaattatgctccaaaaaaacagattttcagaaatttaacttgtgtcatttttaaacaatttcattttgctttggaggatatgtttctaattaagttcttacaatgatttttttatgtgataaaatatccctaacataaagtttaccgtttgaaagtgtacagttcagtggccttattaattttgaagcccttctgtctgtaagaaagtaaaaaaaaaaaagtgcaattataaattatgtttacattttttagaagaaaggtgttctcttcctattttctccccttccatttttttggtgctaaatcaagatttaaaaggggcatggtggcttacacctgtaatcccagcactttgggaggcagaggcgggtggatcacttgaggctaggaatttgagaccagtctggccaacatggcaaaaccccatctttgctgaaaatacaaaaattagtggggcgtggtggtatgcacctatagtcccagctactggagaggttgaggcaggagaatggcttgaactcgggaggtggaggttgcagtgagctgaggtcatgctgccgcactccagcctgggtgacagagcgagactctgtctcaataaaaaaattttaaaaaatgatttaacagtttatctcttttaacattacattaaatgaataatatgacatcttctccttttattttttaaattttttatttatttagagacagagttttgctcttgttgtccatgctggagtgcagtggtgcaatctcggctcactgcaacctccgcatcctgggttcaagggattatcttgcttcagcctcctgagtagctgggattacaggcacatgccaccacgcccagctaattttttgtatttttagtagagatggggtttcaccatgttggccaggctggtcctgacatcttcccttttaaaacgcttgcatgaagttacttcttattttcttctaatctttgtaattctttacctcttgaataggactattctgttatcgatgctgaaaaatctgtagatgaacactaagaaaattattaatagaagcttctaaacccttaataagttccatgtatcttttttaaaaaagtttttattagctaagtcgtattctggttttgctttattcctcttcgtttctatttgtaaccaggttatttgtatatattggcatctaaaaattaaatgccagtttgctttgatgataatcatatatcctctgttgtgaggttcttgccacatatttgacagataggttctttttatcatgaaattaagaaaaataagcagatacattttctaattcagttttggcttccttattgtgtagaaactgcagtgtcaatgtgagcataatacttgcggggagagctgtaacaggtgctgtcctgggtaccatcagcagccctggaggccaggaaccgtgtcctccggcaatacatgtgaaggtcagtatacttagaatctgaaggtcagtacagttttcctcttaatacgtccaagtttatggtgtcttaacaacttttatagttagcaggtaacttgttttcttagaaatttcagtagtttccaaagctgcagattatcttaaaattttaactattgtggcctaaatgtatctttatgggtttgctgttttatctgcaagtcccccttcccgtatagtctattattctgtattaattttacttttgtttttgtttttttaccatgggatatgccaggttgtatattctgtattgatttggatttaagttttaaataagcaatatattcacaagattcctagatctaacaatatgtaaaagtatgtagttaaaagcatgacttccacttcatctccctccttcgcactttttattgttttctagtatgtccttcctaaaattgttatgcatataaagcatacgttaacatatccctccagccaacacagttcttacgcagaagacaatgtactatgcatgccattgtacatatcgcttttttttttttttttttgagacggagtctaactctgtcgcctaggctggagtgcagtggcgcgatctcggctcactgcaacctccgtctcccaggttcatgcttcatgccattctcctgcctcagcctcctgagtagctgggactacaggtgcccaccaccacacccgtctaatttttttgtatttttagtggagacggggtttcaccgtgttagccaggatggtctccatctcttgacctcgtgatccgcccgcctcggcctcccaaagtgctgggattacaggcgtgtgccatggcgcccggcccacatcactttttatatttaacaatgtattgtgaaattctttccatattagcaattagaaatgctgtttttaaaaacaattgcacagaattccattatacaaatgtagtataatttattaaacaaccacctatcggtggttattttgatggttattagtctgttgtccacacaaacaatggtgcagtgattaaccctgtatgtgtccttctcaagtgggcaagtacttctgcaaaatataatcccaggagatggtttgctgggtcaaatgggtatgtgcatttattattttgatattaatagctcttcccaattgtcctccataatattgcccatatcttattaaaattacttattctaggattttaatttaatctaaaatcatagaacttacttagggaggttaagagttttctttgtataaggcatgctatgtaaattaattgagatgttaaaaatattctcctagcatgtaattgtcacaataaagccaaagactgttactatgatgaaagtgttgcaaagcagaagaaaagtttgaatactgctggacagttcagaggaggaggggtttgcataaattgcttgcagaacaccgtgggaatcaactgtgaaacctgtattgatggatattatagaccacacaaagtaagagtatttctttgccattgctgatcttcatcatcttcaccaggtggaaaagagactttgtcaagtcttaacctctgtatgggagacttttgtaatatttcatttatatccttgttatgccggtagtgtttttatatatatatttcctactctatcctgcttttcttgctccaaataagatgtcagtcattgttatttatcttgaattcaggggtccattagctatgtaatcctgggtcataatactaactacagatgtgaaaattcagctataactaaagcagctgtctcttgcctgtaggagatgttcagccaatctttttttttaatttttattttttgggacggagtctcgctctgtcgccaggctggagtgcagtggtgcgatctcggctcactgcaacctccacctcccgggttcaagcgattctcctgcctcagcctcccgagtagctgggattacaggcccatgccaccacacccagctaatttttgtatttttagtagagacagggtttcaccatgtcggccaggatggtctcaatcccttgaccttgtgatccgcctgccttggcctcccaaagtgctgggattacagatgtgagccaccgcgcctggccgtgttcagccaatctttaattgacttgatatgtagttcttacatgagtccttgtggtgtcctggttataacgtggctctgagagacagcagcgcgaagggggctggatagcagggataatagaaaaagatggcactttgctaatggtactaactactgcgaccatcaaaaagatgtttgggcttcctggcttgggatcacctcatcttcctcaaacctaacccccacccccatgcacaaaatcatcgtaatagtcccatcttgagtaaaaagccaataccttcttatttatactattgccaacattgctgttatttttagtaagagaatccagggcaacctctgcctttcaggtgtctccttatgaggatgagccttgccgcccctgtaactgtgaccctgtggggtccctcagttctgtctgtattaaggatgacctccattctgacttacacaatggtaagtacttgattcacttttgtgcttgtaattgattttgtgtgtgtgtggaagatttgcacatactggaactattaccatgatatagccagttggtaacatgattattgattcttttgttcaccaagtatgtatcaagcacctactatgtgtcaggcagtttttgaggacctgggaatgtgtacttaacaaggtagtcaaagtcctttctcacaaaaacactaaacaaataggtacatgggtaatataatgccaggtcgagaggtagtgtcatggacataaagcaaaattaggactcatgaatggagggagatggggtaatgaggtgacaatgttggggtgatgaaatgacatttgagcagataattgagcatttggtgaaggaagaaataaggcccagtttaaagccatgcgtggaacacagtaaatagcaattgctctccttagcttttagaagacattcggagggcttttgcatacatcatctcacagatcaagcaagtcctcccgttaacttggtaaatgtcagagttctttctttcagtttcaaaaactggcaaattgacttgcaaataccagagtctcctgaataggttgcgtctgttcaaagactcttgtgaccccatcaagttctcagccactggcagttaaaatggatatcgagcagtagggatgagtgggcccgccagcgatggggagggtaaattacccaactgaattgattcttacgtgcacctggtgaggggatgatgatgataataatgaagatgatggtggtgatagtggtggtgacatttaccctcaattgagttcatttaaaaaaatatatcatttaaactttgcaaccatagcagatagaaattacttaacccactttgctgtagctcagagcagtcaagaaggttaactgcctgaaggtttcaaaaccgacattaaaagcaaagatagtgcttgctgctctctgccacttgcctctgtgctttttttttttacaaaacagttttataatttacaatgatacagttctcccatttgaagtctacaattcattgttttggtgtattggtgcaaccatcaccacaatctaagagtcgaacattttcatcatcccataaagaagccccttacaaactagctgtcacttcttactttcctccagccccttctcccggcccctggcaatcgttaattagctttttctttgcagatttacctattctgaatattacatagaaatggaaccaaatatgttggtttttggtgactggcttctttcatttagtataatgttttcaaggtcatccgtgttgtaccacgtatcagtatttcaaccctttttattaccaaataatatttcatagtatggacataccatgtttcatatatccattcatcagttgatgaacatttgaattgtttctactttggggccattatgaacaatgctactagggacttttgtgggtgtatgttttcattattttattgggtgtttacttaggagtgcagttgctggatcttatggcaactctatacttaacattttgaagaagtgtcaaaaggttttccaaagtcactctaccattttatattcccagctccctccatgggtttcatctctgttttctttctttaaacaaggaattggcaaactatggcccatgggccaaatccagcacactgtctgttcttatgaataaagttttattggaacggagatatagccatttgcctgtgtattctctatggctgtgttcaaacaataacggctgagccgagcagctgcaaatgagactctgaggccaaaaagcctaaaatagacaccctctgaccctttacagaaaacgtttgccaacccctgctttaaacctctgttgccttcatgttgggtcattgccattgttgtctttctagggaagcggccaggtcagtgcccatgtaaggaaggttatacaggagaaaaatgtgatcgctgccaacttggctataaggattacccgacctgtgtctcctgtgggtgcaacccagtgggcagtgccagtgatgagccctgcacagggccctgtgtttgtaaggtaagtggggaggtcagagacacccctgagcttcctttgagcttctctggaaaaggagtgttttccattggctccaatgatcagttcttgagcaaagtggtaaggtttaagcagaactccccttgccccttctctccaagccacaccgagttggctgtattatatatgcttggactcacatgggcatctggcttgctttttttgtacctctggtaatggtgatatattccagaggcatttctgtgacttcttagaggacaccaaacactgcatacctttatattcccacctcctctgtgggcctcatctctgttttctttctttaaaccaggacttggtaaactatggctcgtgggccaaatctgacacactgcctgttttgtgaataaagttttattggaacagagctgtatccatttgcttatgtattttctatgactatgttcaaccaataaaggctgagttgagtagttgcaaaagagatgctgttgacccctagcttaattctatggtattcttttccagctttgtattcggaagagaaccagattaacattaaatttctgagaacaccaattaaacgcagatatgctattttgagtgtctcttaaaaaggagttgaatagtcataagaaatgcattaatatggtgccagtgaggggttttatttggccttacagtattaataacaatttcttcataattcataggacattccattgtacctatgtgcttattcccacctgtgcagtcttaggcacatgttatatactactggaaataatcttgagcatttatgaatacgagaaaattctatagctctcttcagattttgaaatgctggcaagatcagtaaaaaatgaaagatttaaaacaaaacaaaacaatttaaatggaatgaccaagttctaagatctccagccttgttcttgagtacaaaatcaaattatatataattcaaaatctctattctggaaatattgactttatgaggcctcacctttactttggacgtttattcacctgtctctgtggatcaccgaacacctatcttgttaatgtcattttattctctctggacagacacattggtttcaaaagctaatcttttaccctaacttacaggaaaacgttgaggggaaggcctgtgatcgctgcaagccaggattctataacttgaaggaaaaaaacccccggggctgctccgagtgcttctgctttggcgtttctgatgtctgcagcagcctctcttggcctgttggtcaggtgggaggcgccatctgcgaggcgggatttaatgagcaggtcgtattgcacaagcttggcacgagctgtgtgaggaggaaatgaggatgacttcccctgtgacaccactctcatcgctatgcaatgatactgacgtgggtcaaaggcagccgtctgcctctcaaggttctttataggtcatgtgtttactcccacacacatttctatatagaaaaaacaggatgatgtggcactagagaacacgtcttgtttcaatttcttctgtggggaaatggattgggtggggaggtcggctctccctccgcccgcccctgctgctctcaggcctgggagcccagagggccgtggggccatggggattttccagctcaaagaggctaaggagtaggaggccctccagtggcaagggtgggaacagcggcacgtggtgtagggtttaggaatgcaggccaagttgtttccggaacagggagttctggggtgatgggttcaacaggggtgtccagtggtggctaggagaggtggagatggtgtgatggctgcaggcaagggaggagctgctcggtagggacttacccagcagtgactgctgtggccaccatgctgtggggagtaccatcacctctatgtcggtgacacattgggagtataagatctagaggttatctttgtacatttttcagcatttgggtaaaaagcagggggcaacgaagaagagggagtcagagttagcaagagacattttgctgaatgcgtttatgatgttctttgctgttttaaatctaaaatctatacccatggcctttatggttttgctcatttatttgcttacactggatctggatttggagtagtgagacttgttctcaggtcctcctggtcctttacaagtggaagggtcaagggtcatgaggttcagcagccacaggtgttatgttaatgccgtccctagagaagctttctggcccatttcttcattgtgaaaatattagtgctgcactgggtgaaatctaaggtaagttctatttcatacttcaaaattcttgaatttgtttttaaggtaaacagtatgtccgggtggctggtcaccgacttgatcagtcccaggaagatcccgtctcagcaagatgcactaggcgggcgccatcaggtcagcatcaacaacaccgcggtcatgcagagactggctcccaagtactactgggcagcccccgaggcctaccttggaaataaggtgcgtgtgaccctgcaggtagcgatgtctcagatgaagatctcagggaacactgagaaggaacttgcgctgcttgcattttaggtagtctcatagggcacctgagtgttggacagcatttcatagcctgtacttggatctgatgatacaaagaaggttttctagccttgttaaactttatgttgtattattcaaataagaacttctgctcttctggtctggttcctgagcagtgtgtttggtgaagtctcatccccctctctgagataaactttctgggtccctggatcacttgtttatgaagtgttcctcacattcccgctttgtttagtttgccataggctcagcttagagcctccatggcttagtggagggcctggcatacaagaaacaacccagggaaggttccagcaatgggactgctgtgctgctccctcactttgagtaccatggcaggctgtgctcatctgaagctcacatttaggaacagatggaatactttctgcttttgttatatttcaagaaaatgcaaactggtgattctgcaatgtggaggttggtttgtaagcttgggccttccttgcaatgatgtgttcccattccccatccccagttatgctgcatctctccagattctgattgatacgaaaatttattcccgagaatgcatctcaattattatagctccctgcttaccttcccgggttctttgttttgttttgttttaaagtaatggcatacaggcatgctagtgtagtcttgtagcttggtacgcttctatttaatttgatgatattttcattttaaaacttgttttgtatatttttaaggagtatttatttttgaaaattattttttcatcaaattataatcctagaacatgtgctgtatttatatgattttatcaacagagttcaatgattttttttctcttgatatcacttctccaattttatggtgcaaagttgggttctgaacaatatattgctgtcatatacccatcagaaagaaaatcttaattttatattgaaggacatctaatcagaagaaacacctttagtcctttctctaactagcaaatcagacatattctttgttgtcctatgaggaggatgctgaaatgaaaatgtggagattgcagacatgggtcaaactcctcatcccctaaattacttaaacgaagtaaatatctattgtgtgattaacaaaagtttatagtaatttgccttgtggtctctaacaaagagtacatttttcttctgtgctttcaaacagtgtcctacatgttggtgatattgatcaaccaaaatgtttatgaatatattcccctttcactgcctttaatgtgaatttccttgtctgtcatggtcaaggggatagttgtagcctagttgtttgcagatggatcccagtgaccacttcctcttacttgattgttgctgtgattgtcttcccctttcgtgttcattctcgcttaaacatttcagctgactgcgtttggcggattcctgaaatacacggtgtcctacgatattccggtagagacggtagacagtaacctcatgtcgcatgctgacgtcatcattaaggtgattgtttttgctttgattctgctatagagcttagggtttagtgggctgatagtttatgactgaaagtgactaggtgagggcatcccagcaaggagctggtggccaggtggccattcagcagaccctggacttgcgtggggactactgagatggtgagtgtgagaatctgtctttgagcccatttctggagttgcctcaggacagcacctgccactcttctcttcatctccagggtgtacccatcttttcacatttaaaaagaaagggagctgggcttggtggctcatgcttataatgtaagtgctttgggaggctgagacaggaggattgtttgaagccaggagtttgagaccagtctgggcaacatagtgagaccccgtctctcaaaaaatattagccaggcaccatggcatgtgcctgtaatcccaggtactcgggagggtgaggcaggaggatggcttgagcccaggagttcaaggttatagtgagctgtgattgcaccactgcactccaacctgggtgacagagagagagcctatctcaaaaaaaaaaaaaaaaaatttaagtcaaaaggagacaaattttttctctgaccttgaatcttcttttttaagtctcttcttccctgtgccactttgcctctcagatgaatggattaggcagtacttggcggtctgaggacagtagacgtgttgccatacttgtcctcagtctctgtccctatccccacatcctcagtctccataaaaagatccagctcagtcaggaggactccccaagtggtaatgtcccagggtctggggcatgtctgggcagaaaccactccaggttcttgtctctcatgtcctttcacctggagctatcttcacctccatctccagcctgaacaattgcagaccgcacacggtaaatcacttttgttaacagcaacttgatgaaaagctggagctatgtttacatactttttctacttctgtactttagttaaagattagaggtgtcagatgggttgctttgataaaagctgtgggcaactgcatgactttctctcttttccaagatcccagcgaagtacacaggctttcagtttattaccagaacccctctaaaaataatacaatgaaacaccttttctctgataattctgggtcaagagctgtacacaccattacacgtttgccacaagaagctaggcacgaatgaaaaaccacgttgctgaatacaaaattttattttatttttattttatcattaaattgaatgacaaatatattttctcttgtttttaaatgttagggaaacggactcactttaagcacacaggctgagggtctgtcattgcagccttatgaagagtacctaaacgtggttagacttgtgcctgaaaacttccaagattttcacagcaagaggcagattgatcgtgaccagctgatgactgtccttgccaatgtgacacatcttttgatcagagccaactacaattctgcaaaaatggctctttacaggtatgtattgaaaatggaggaaaaacttatggtgaaggtacttccattttatgtttgtttattcatatatatttaaagctcaacgtattttacattcattatattaaggacacagctacaggaactggctgtcttaagaattattaagtttataaatgtaattttattgaaaacgtaagaacagttatccacatcaagtgtatccagtagaagacagacttgacattaggatgagaaactttcaaagggggtttctgggaaatgcacgatgagttagcgattgtctggaccatgttgcacctggttctcaccatcctaatgttaatggtcttagcttttactcagtccatttaagtgaacgtatccatcgttggtcatttgattactttcgggaggacaatttctggcaatgccgtgccaagcataaaagttgtatgcagctaggctgggcatggtggctcacacctgtaatcccagcactttgggaggccgaggcaggtggattgcgtgaggtcaggagtttgagaccagcctggccaacatggtgaaaccccatctctactaaaaatacaaaaaattagccaggcatggtggcgcatgcctgtagtcccagctattcaggaggctgaggcatgagaatcatttgaacccaggaggtgcacgttgcagtgagctgaggttaaggcactgcactccagctggggcagcacaacgagactttgtctcaaaaaaaaaaagttgtatgcatctaacacaaacatagcatgacacatttaagggtaatctttctatttgtgataattgaatggattaatttttctgaggtgcttcaactccaaataggcaacaccagacctttcccacagtcatctgtgggcagcagcatgactttgtaccaaacattgaaggcatttccagggaataatgatggctcccagagaatatattgttgtgaaagacctttagttatttacaaaaatcacatcacccttttattggatttaagtcttttttttttttttttttgagacagagtctccctctatcgcccaggctggagtgcagtggtgtgatctcagctcactgcaagctctgcctcccaggatcaagcgattctcctgcctcagcctcctgagtagctgggactacaggcacatgccaccatgcccggctaattttgtatttttaatagtttcaccgtattagccaggatggtctcgatctcctgacctcgtgatccacccaccttggcctcccaaagtgctgggattacaggcgtgagccactgcgcccggctggatttaaatcttttaggagcccatcttcattgagatgtgagatgtatttgcgagcgtgtgagtcacataacaatctgtctgtttgtaggttggagtccgtctctctggacatagccagctctaatgccatcgacctggtggtggccgctgatgtggagcactgtgaatgtccgcaaggctacacagggacctcctgtgaggtgacgcttctctcttcctgtctttttccttttgttccttcctgaggggaaaacagtgcactgaaggggatgtcatggcaaacatttgatttttagctttagcagcccaatgtttggctcagtcttttttgggcaatagaaatattagaagtcacattgtttaaaaaaatcagattcctccaccaggaatgggctggagcaccggacaatattctgacttagtgctgccctcctgccttagtcaacaagaaacttgcaatacgcatgccattgactgtgtttctaaggaggatggaacttgatcatatctgaacatttacaaatcaccagcatgtgacctgggtagctttagacaagccagccctattttgagaccttttatggcccctcgctattttactttggtgggctccaccttacatgtgaaatatatgaaaatgcacttggaatcctcaatgaaagtaatctgttgctaaaaatattttgaaatcacttggacaaacatattgatattaataccataacaagaataggccgtaagactcattgcacaaccattacgtttttgtgtgtgtgtttctacctttaaaaagaaataaggaactggattatggtgatggttgcacagctcggtagggtttttactaaaagtcattgaattgtacacttaaaatgggtgaatggtgtagcatgtaaatgatacctcagttaagatgtttaagaaaaaagacatttctgtactctggcaactgagcagtttctgtttgtaacgtagtggaaagaggatgactttcccttctcttgcagtcgtgcctctctggctattaccgcgtggatggaatactctttggaggaatttgtcaaccctgtgaatgccacggccatgcagctgagtgcaatgttcacggcgtttgcattgtgagtctctcactgtagctcaggtgccctctcctcctcaattcagagccatttgctgtgtacaagtgattttttttaagtgcttcctccacggaataaccctagcctcatagaccccaaagaaaatttacagatttaagctcatgtcatgaaatgtttcccgttttttttttgaaaaaagttactttggtaatagtggaaaagggatatacaacttcattatagttctttttattagaataatataaagtaattgtttttatttgctgagactataaagcaatagaaaggtaaaaaatgttgtctacttattaaatacaaagcataggatctttagatgagagtgctaatatttatttatttatttatttatttgagacagggtcttaccttgtcacccaggctggagtgtggtggcaccaacactgcttactgcagccctggaccttctgggctcaaatggtcctcccacctcaaccctccaagtagctgaggccacagacaatgctagtatttttttttaatcatgatattacataatataccctaagaagaagaataaagtataatcacactcacttatataccatgctttatagttagttgggataaattaatcaaacaggtacttctttcatgcaatatgagttgaaacagggcttaagaaataggtagttaatcttgagaatgaactttggggcaggtatggggcaagacttgtttcttgacttcagtcaggaattcttctaggccctatgccctgaagccaggccacactctggggtctcatgggtttgatcctcagaggtggagtgactgcatatgctgatcagctgtaccctggtcgcctggcagggaaatgttcatgctttttccaaaagagattgactgagtcacagagttagggaaaattaattaccagacccagggagaagatcttagaatgatgtccaggatggcttagtgtctctagaattagaacttaatttttctttattctgtaagtaaaacttttgttttgccctttgttctgtaagtaaagcttctgtaggaattgcatgaaggggtgctttacaggcagactcagtccctccaggattgctttcctcaggtgcacagcttccaaccgcttgatgaggtggttgcttttttttcacctcctttcttttgccatttgggtttgcaaggcctcctgccagcatttggggtggggtggggtggggggtacagcaggctgtggttctgccacttatgtcttttgtagctaggctgaaagagtagatttctcatgcttccattaatatatgttcacaaatatatattcatattaaagtgataatgctaaatagcagctggccttaaagctttaatttgaataaataataattttatagctttaaacatgttttggaaataattttagacttacagaagagctatgaaagagttacagaagtacagagagttctgaagtaaccttccctcagcatcccctaatgctaccatcttgcataaccagagtggagttatcagaatgaagaagtagcacgatgagatgaactacactgcaccccacattctgatttcgtcagtttttcacccatgctccttttttttgtaggatcgaacccaggaccccacaccattcagtgactttgcctttttagtctcctctcctctaggaaagttcctcagacttccttgtccttcatgactctgacacttttgaagagcactgagcattctgtggaatgtcccccagccagggcttgtctgatgctttcctatgactaggttgaggttacacatttttgaccagaagacgtggaggtgccgtgccctctcattgagagcagatggataggatatcattgtgtcttcttcctggggatcttaatctgggtcacttgaattaggtgatgtcagctaggtttttccactctgaagttactatttctcccttcttaattaatgtttgagagggcaaaaataataaaaatgtaaattagaatttaaggaaatacaaaaaacatggtagcatcatatatctgttaaatctaaccttgctggttttttttttttctaatatattgtaaaaacaagcttgaattcttccttttgtgtagttgtgcatagccctgggccttgcgtataactatctagcttgcaggagttaattctttatttacagttcattagagatgaggttccagttgctcttagagcccctgtttttctctctgagctctcttagctctttattcaaaggagaagcctgtgtattttccttgcagcttggcatgatttagaaaaaagaatggcatcacagtaaattgtgcatgtcttgggccctcatgtctttcttttttcaatcgaaagatgtttttcctccccaaggagaggaatagtctcattccttcacacaccagattgaccaacagggacagtcaggtaaagggctggtggcacacgcctgaaaaagcactgaaacagaccctcagtgggtttttcaacaggactacatactagtttccccaaagagaaagaaagcactatctgactccttgatcaaagaaaacataccatagacatgttccaaatgagcattatcaaatatttttaaaatgaaattgcagttactctgcagaatacttttagctcaaccatgtaaccctttactaagaccagttgcatcttgaattaatttggattcattatcaaacccaaggtcctatgaaggatgggaaggaaaaaagggtctaagactctgttgtctgaggaccagcagtgtgggcatcacctgggagcttgctagaagtgcagaaactcaggccccacctcagatcccctgaaccagagtctacaggtaacccaggtgcaggtgcacttattaatagattcatattccagtttagatgctctggtctaggataaccctaagtaaaactggtgaaaccctggagtaaaatggatgtaatacaaatgcttacaattccaaattaaatgtggtatatgggaaaactttcatcaacctgaggaatgatggaaatgtatatggtttagaaactggaaatactaaattgctagatgaaaaatgaccaataaaagtatgtaaaatgagtggccgtaggagaaggggacacggggaaatgggagctgaggtgcacaccaagaggagcagccacacacgtgtgcagaacaagccccgctcccttcgagcccgtagctgcccgggggtcagtggtgcctggtcctggccccagtgccgacctccgcacccctcccctttgctcctgcacacctcctaaccaccgactgcactttcttttagaatgttttaaatgagggggggaaagtttttcatattttttcatgtatgtaccatttccagtgctcttcattcgctggtatagatctatgatttcatctagtaggtaccacctttctacagcctggattgttagcctttctgtagtgcagatctgctggttgacagattctcttaactctcctttatctgaaaaaggcttgccttcagttttgaaattgatttttacagatttctctttcagtactttaaaattgttctgttgccttgtggcttacatggcttcaggtgagaagttagttggtggtcatctgcttatttctgtgtgttattctgccttttttctctgcctgctgttaggagggtctctgtgtccctgggtttgaacactttgactgtaccttggtgtgtatttctttatgctgggggtttattgagcttctagaatttgtgagtttgtagctatcagcttatgaaaagttttgaccaaatagcttttcagcttcccactccaatctaattgcacgtgacattgatccacagatgatagaggctgggatcttttgttttttcctaaagtttgagtttctgttgttgtcttcaaattcactcgtcttttctcctacaatgttgaagccgatgcccacccattcagtacttcattttggatatggtagcttctagttctagaagttctacttggtcctactttatatcttgcatttctcttttcacagtgtttatgtttccttcaagtctttgagcatgcttataatagcttttttgtttttgttttgagatggagtctctctctgttgcccaggctggagtgcagtcacgtgatcttggctcactgcaacctctgcctcccaggttcatgcaattctcccacctcagcttcctaagtagctaggattacaggtgcacaccaccacgcctggctaatttttgtatttttagtagagatggggtttctccctgttggccaggctggtctcgaactcctgacctcaggtgatccacccaccttggcctcccaaagtgctaggattacaggcgtgaaccaccgcgcctggcctatgttttacaagcctgccaattccatcatctctgtgatttgtgggcatgtttctaatgactgggttttttttttttttcctgattgtggattgctttttgttgttgttgttgtttctcatgtctagttattttcattccccataaaaaaaacccacctctttatttggaaataattaggagtttacccaagatttgtaagaataagaatggtacgtagaacacctgccatttatctagactcccgtgttgttgccattttccccatttgccttattaatatcattatctgtctacctatctaattatagtatgtttttctaaactccttgagaatagtttgcatagacaatggccattttggtgtgtatattgcaagaataaggcttgtctcttgtataaccatagtacacttatcaacttaagtaaatgtaacgctggtactctactttttctaacctaccacctgtttctcagttttgtcagttgacccaattatgtcctgtatagcatccttccctccagcacaggcccccatctaggatcagatgttgaattttattgtcgtgtctccttaggcttttaacaggaaatgtttctactgcctttctttgtattttatgctattggcattttgaataatataatcttttttttttttttttttttttgagatggagtctcgctgtcacccaggcagtggcgccatctcagctgactgcaagctccatctcccaggttcacgccattctcctgcctcagcctcccgggtagctgggactacaggcgcccgccaccacgcccggctaattttttgtctttttagtagagacgggatttcaccgtgttagccagggttgtgttgatctcctgacctcgcaatccacctgccttggcctcccaaagtgctgggattacaggcatgagccaccgcgcctggccgaatatagtcatttttttttaaaaatagaatgtccttggttctgggcccttcttttgtttctcatagattattcaggccggaatactttgtcaaggatgagtctctcagagcactgccaatgggagtcccagtgtctgtctggccctcattggtgatattaattctgattacacaggcaaggtgttggtcaatttttccactatatatgaacgattctttccttttgcaactaaaaaacagttggaggcggacactgtgagaccacgtgcatatcccactcttcatcagaattccccttagagtagcagtcggaaggttctggccgaagcagcacttgctgtcatgtttgcaaaaacttgatcctccatctcctgcccttgtccatgctcatcagtcagagagaaagctctcaggtttccaatttatacaaattacacttgctgatattaatctgaaaacaggaggccttcctcatatagctcagaggttggtgactggttttagcattttgtcttttttttttccacttggacttcaagttgcttatagataaatctgaaaatcctttaagacaacctgagctgattcttctggtgcatgttcctaggcgtgtgcgcacaacaccaccggtgaccactgtgagcagtgcttgcccggcttctacggggagccttcccgagggacacctggggactgccagccctgcgcctgccctctcaccatagcctccaacaagtaagcctcagacctcatcaacggttcctgccagcatggccaggattcccacccagatgcgtactaatgacttcagagcaagactgtgtgtgtaatatgtgtgtgaattttgcccagtgacaattgatttggattaaagacagaggggtgggttattttcttgtaaaccaaagtttggcttatgaaagcaggcaagaagaggtgtgtgccagcaaggacctatacacgccgttttccctcttgattcctcttggtcatcagttgtttcacaagtatatgttgtctacttaccagtgggctaggaggtagagggatacagagaggaataaaacattgtccctcgacttagggagtttttgatctaatgaccaaaatatgtatgcatgaggctaaacaagagcagtctaaatccattcattgattcaacagatatttatggagtgcctactgtgtcctgagttttacagcaggtgttctgaatagcaaactgttctcacctggccgtgggccccaggggactcagtgtggtcgtgactgtagtgagacctgtccaccagatggtggggaggagggagagcagtgtccagcctacctaggtgggtgcaggaagctcttctctcagatttgcaggagaaggaattccacaggcagcatagacgggcattctaggcagatggagctgggcgtgccatggcatggcagcaggaacaggcatcacccatttgaggaattgcagcaggccatggaacagaaggcatggagggagatggaaagagatgtaccaggcaagaccttatagtcacgctggggcaagtgcgtgccacaggccagcagcttaaaagcctctgtctctcgctggtttaacctttagaactcttccttcacccactctcaaagaattcccagtatataaaaaggatgcagtcagggttactcatgatgaaattgggggtgggtactgtcatccaccctgcacaggctcctcaaggtttaggaatagggttggaaggggcatccgttagcagggggtccctggagaggtgcgagagcctcctgaccactttgtgtttgagtgagctcacttttgccctggtatgggcagggctctgaggtgggaagtcagtgccagggaacctgagctggggaacccagcatcctaggagcacccgagcaggcctcctggaggaagcgtcagctgagttgggcactggggctgagctgggttaacccaggcagacagcgggagaagcaggcgcgctgtgggctgagaacgagaggagtagggagcagggagtgaggagtgagtgtcagtgcctggatcatgggaccaggagtccgtgaggggttgaggctcacaggtgggctgtgtgaccagaggccccggattctgagctaaggaggtctcattgaaggtctggaagcgcaggagtagtagaaatgaagcattttaaatagttagaaattcggcttcatccattggaaaattttgttcatttctaatgttttgacagtttcagccccacctgccacctcaatgatggagatgaagtggtctgtgaccggtgtgccccgggctactcaggagcttggtgtgagaggtactctgcatccactggcttcaacacattttcaaaattaaatataaattctatgtgtttatttttaaatgcgtagttaagtgtggttttggagttttgatgcataattgttatttcatagaatcattgagaaaaatcagtatttcatgttttaaaattaatgttaaaccttactgggaatttttaaagaacggtactcttttcctggctaatctgagttctcatcaagaacaataggctgggtgtggtggcccacacatgtaatgccaggactttgggaggctgaggcaggtggatcacctgaggttgggagtttgagaccaggctgaccaacatggtaaaaccctgtctctacaaaaagaaaaaaaaaaaccaaaaggccgggcatgacggcgggtgcctgtaatcctagctacttgggaggctgaggcaggagaatcacttgaacctgggaggtggaggttgcagcgagtggagattgcgccattgcactccagcctaggagacagagtgagactctatctcaaaaaacaaaacaaaacaaaaacaataggaagcagcaaggagtcggtatctgtggttcacacatttgaatattccattgctccaggctgttctggagatgacaggtggtttgctttagtagctgtcttctggctcctgaaggccagtgctgtctttcctatgtgtgcgtctcagtgcccagctctggctgagcctgcaggaggctgtgtggcatccggagtggtcaggggtgggtcagagttggccctggaaacaggtgcacgtcccctggatttatgcctcattttggacgctctcccccttcattgcgacaggtgaaggagatctgggaatgcccgagtggggagtcatatccctttcacagtaaatcttagggaacagagtccgtctgatttattagccattcagggagtccctggatagtgcggtaaggccttaagtaactgcatttgtctgatcccgctttcaatctttgatacagatgcgcagatggttactatggaaacccaacagtgcctggcgaatcttgtgttccctgtgactgcagcggcaacgtggacccctcggaggctggtcactgtgactcagtcaccggggagtgcctgaagtgcctggggaacacagatggcgcccactgtgaaaggtgtgctgacgggttctatggggacgctgtgacagccaagaactgccgcggtgagtgcgtgagcgtgaagtcaggtcagctgtttattgccataggaagtcttcaaccgtatagtcacatgtgtcacacagggcccagcctaggaggtcacactctcttgaggggttacttgcattaatgctgggtctctgatcaaatacagacccacgacccagttcttccctagctaccctatcctgagcttggttagtcataacccataggggtcagtggcctggaaagatgcagcctgccactcgagcagccagtgtgacttgacagagttccggctctgctccccgtgactgaaatgaaagtggggaagctcagagcctgtcacatttgtaagggagatgcttcaggggctgcacgaggcagatgggattccaagatgaagggtgggaaatggtaagactgtaaccccagaaactgcgtaaagcaccgtgtggtgcatcttagccctctgtgccaaaactgcccgacccctatggcactctgctgaatttgagccttgaaattacggatcatggagaaaactagattctcctacacagcagatgacctggccggagggatgattcagccctcagattttgaaggagtgaaagaacaaaagtggcaattataaattattttgagtatttcatataaatgccagtcacactatggtactacaacgtggggacacaagagggcaccagctgtacagaaaacatactttcccaggcacacatggagagattggaaatgttttatggccctgggccaatcaagctgatctccagcaggtggccaccttgactggctatcataccaggataattatgataatagcatttctacaaggcttcacgatttgtagaatgtttttatcattttcatgtcatttctcttcatcattactgcaagccttggtgattcattcctccgttcattcattgtttattaagtgtccggtatatcccagacgctatactaagaactgtgacaggtagttgggaaattgtgattcaagtctactgggaagctacacatgatgatggtatggggggaaaacatacctgtggatccaggtgttggagtctcgactaatgtgagttttgttccaggaccaactgtgtgacattgggctaatttattagcctctctgagccactattttgttattcataaaatagacataattatatgtgtatatcaaggcctttctgagaagtcagtgcgataacatttaatgttctagacatgaaataaatggtagctattataattactagtaataaaccaattattattatattttataatatattatatattatattaatataatatattattatattttcacaccactgctgtccaatagaaatacaatgtaaaccacacatgtaatttaaaattttttagtagtcacatttttcaatagtaacaagaagtaggtgaaatgtattttaataatacattttatctgagctgatatattaaaaattagcattttgtcctgtgatcaggttttaaaagtattaagcaatatttactttcttttttagtactgagtcatcaaaattgaatgtatattttatagcccagctcaattaggatgctaaattttcctcagaagtacttgatctgcatgtaggttacagaaaatttacaattgaaaaggtagttcaaacatatttaaaattttccatcctgtaccaaaaattattttctttaatattggcatccacgttgacaaaaccgcttcagtatttaaatttaaactcagagatttggttcttcggttgcatcagccacatcgccagcatttggtagacgtgtggttggcagccacaggacaagactgtgaaggtcaaggcgatgaatgactgtcgggggttgcacttgaaggcacggaggcgggcaggcccatcagcccagggtggcccgggctgcctcctgaagggggtgctgttcatctgagacttgaaggatgggaagaagagccgcaagaagagtgaccagtgtgggaagatgggcccaggcaagtgggcaggccctgcctgaggtagacactggagacagagtgaccagaatggaaaagacagagacaggaaggggaggtctcgggctgacaggtgggaagcagccacgtcggaagggtctcctgtgcagtgttgaggtgctgaggtcacctcgtcctccctgtcctgggactcaccagcaacttgtgcagacatggagcgggtcagggtgtgattggagctgtgtgtttgaatatcgccctgctgccagcgtcgaggagggaatggctgccaggggtgttgggttaggagacaagaccggaaatgaatctttctggtaagcattgatgagggcttcaggtagggcctttgccatggagataaaagagaagacgtaaaataggtcttgatgacagggtggaaggtggaggaaggacggttagagcagctggggtttgggtctgggcctgggctagtagggctgatgctgaccaggctgtctctggtttctgaacacttacagcttttatcctttctcatcccttctctcgcatcccctcgcttcgatgagacaaagtcctgtgaactgtttctgcatatcccacgagcagtccttccatttctataacagggttccctctgtggacttcctgtaggccccccattcttatattctgttaggttaaaccaagtgcaagtgccggtgttgtgtgtgattgaccttctctaaagcaagcgcgtatagttcaacccagtatttatctgtttccccccaccccccgtaactctcactcacttgaagcttggtaggaggagaaactgatcgtcaggttcacctcctgcctctgctgtggggcagcggctgcagccggaggtgtggacaggccgtccaggtagagtagagcgctgagggagatgagggtggtgagaaacctcacagaactctaatattaaaggactcttatattaaataagttaaatgaggataatttttatattgtgagctactcctgagaattaaaatatatataaagtacctggctattcagtaattggcctaaaataatactattttaaattagtactatttataacataaatactattttaattaagaattactataataggccgggcatggtggttcacacctgtaatctcagcactttgggaggctgaggcaggtggatcacctaaggtcaggagttcgagaccagcctgcccaacatggcaaaaccccatctctactaaaaatacaaaaattagctgggcgtggtggtgagtgcctgtattcctagctacttgggaggctgaggtgggaggatcacttgagcctgggaggcggaggtggcagtgaactgagatcgtgccacggcactccagcctgggtgacggagtgagaccctgtctcaaaaaaaaaaaaaaaaaagaattaccataataattattactgcagagagagaactagtaatagcagtgtgacctatggaaagttatctaatctttccaagttgtagatttcacaccggaaatagagaacattatttcgcctccctccttggtttgtggtgaaagtacaaagaaatactgaatgtgacaggcacagactaacagacacatcatacagtgaatatgattttttaaattatcatcaatagtttgcattgatcatacttgcattgaactttaaatattccccagagaaagaggcggcttgaaatgaaacacggaggggagacacacgagaaacaagagggagggcaggagagtgggcgtcccaaataccacaggaagagggcgatgcaaaagggagagggaggtcacggggtcccttccgcagagccacggggtaagagggggaccgaagactgctccctgaatttggtgcctgggaaatctctggagactttagggagaacagttgtagcagacaaggggccaggaggacaccatgagaaacttggattggacgaacgtgccagggaggtggatgttctgatggagggtaaaagggagggggtgtcttgtgtttgatgggggcagtggagaaggacgtgctggggagttagcagcagagtccgcacggtccagctacggcgttgatggagcaagtccctgaagggcgccggtgaatggggcctctcgtgggactgcagcattaaggcccccactccaggaaaacagacggccagcctggcctagatcatgaaggaggcggatcccagcacgtttcctctgcccctgaccttcccatgtcatgtcccatgtccagcactcttgctgcagcctccaggtcgtgtttaggccttccattatttgtgaagtttttctctcttttttcttacattgttatgtcatgacacacactgtacatgttctgagtccacacatttataaagagtgcctgggggcccggcgcagtggctcacgcctgtaatcccagcactttggaaggccgaggcgggcagatcacaaggtcaggagattgagaccaccctggctaacacggtgaaaccctgtctctactaaaaatacaaaaaattagccaggcatggtggcaggcgcctgtagtcccagctactcgggaggccgaggcaggagaatggcgtgaacccgaaaggcggagcttgcagtgagctgagatcacgccactgcactccagcctgggtgacagagtgacactccatctcaaaaaaaaaaaaaagagtacctggaatattttaacaggcaacatattaaatgttcttttttttttttttttgagaaaggggttcacacttgtcgctcaggctagaatgcagtggtgggaatcnnnnnnnnnnnnnnnnnnnnnnnnnnnnnnnnnnnnnnnnnnnnnnnnnnnnnnnnnnnnnnnnnnnnnnnnnnnnnnnnnnnnnnnnnnnnnnnnnnnnnnnnnnnnnnnnnnnnnnnnnnnnnnnnnnnnnnnnnnnnnnnnnnnnnnnnnnnnnnnnnnnnnnnnnnnnnnnnnnnnnnnnnnnnnnnnnnnnnnnnnnnnnnnnnnnnnnnnnnnnnnnnnnnnnnnnnnnnnnnnnnnnnnnnnnnnnnnnnnnnnnnnnnnnnnnnnnnnnnnnnnnnnnnnnnnnnnnnnnnnnnnnnnnnnnnnnnnnnnnnnnnnnnnnnnnnnnnnnnnnnnnnnnnnnnnnnnnnnnnnnnnnnnnnnnnnnnnnnnnnnnnnnnnnnnnnnnnnnnnnnnnnnnnnnnnnnnnnnnnnnnnnnnnnnnnnnnnnnnnnnnnnnnnnnnnnnnnnnnnnnnnnnnnnnnnnnnnnnnnnnnnnnnnnnnnnnnnnnnnnnnnnnnnnnnnnnnnnnnnnnnnnnnnnnnnnnnnnnnnnnnnnnnnnnnnnnnnnnnnnnnnnnnnnnnnnnnnnnnnnnnnnggctcactgcaacttccgcctcccaggttcacgagattttcctgcctcagcctcccaagtagctgggattacaggcacgtgccaccacgcctggttaatttttgtatttttagtagagatggggtttcaccacgttggccaggctggtcttgaacgcctgacctcaggtgatccgccttccttgtcctcccaaagtgctgggattacaggcatgagccactgcgcacagccaacatgttaaatattctaactgaagtgcttattaagggttcccctgtgaatattgattaaatatattttggacccgtaagattgtatcactttgcaaaggtagggaactttgtagctttaagcatcaatgttgtaactgtagataaaatggaaccatctgacctgaaactacaaatgactcatgacttagaactgggatatcatatttaatgaaaagatatttttcattaaattatgaaatataatattaatatgtacttatttagattacgttttaactgagctttaaaatattaaatatgtacctgtttggaatcagaggaaatggctaagttgattttgaaatctccattgcatgtttttcatgggaatttgtagctcatttaaaatatgtccaggaagtcatgaaattggttaagcgaatttgctaattattgtcttaatagcttcaatgtgtttttcctgtgatggatccttccactaaccctgttttagtttactcttcagaaaaatgctaaacttctaaagttattgccaataatattatttttagttttgtgatttgaaacattgaaagtttacattttttttttcctttggggatgacggatcttatgataaccatcctcagaagtgagggttaatatgtctttgtgtgcatgtgtttagcctgtgaatgccatgtgaaaggctcccattctgccgtgtgccatcttgagaccgggctctgtgactgcaaaccaaacgtgactggacagcagtgtgaccagtgcttggtaagatgcatgtgactaattgacaacttagccttggtacagaggcgattgaatccatgactcagaaggagctaagtccccaagtgtattagtctgttctcacactgctatagagatactacccaagactggggaatttatccacaaaggaggtttaattgactcacagtttcgcatggttggagaggcctcaggaaacttacaatcatggtggaaggggaagcaggcaccttctttacaaggcagcaggagagagtaactgtcaacacttataaaatcatcagatctcatgagaattcactatcactagaacagcatggggagctgcccctatgatcaaatcacctctctcctttgacacatggggattacaattcgatttgcgatttgggtggggacacagagtcaagccatgtcacaaagtgtggctgacaagtgccgtgcctgtctagagagtggatgtttgctgtaaagggatggggatggtgtcatgaatactttatgattctatgaaataccctgtgtgtgttctggaacatactaatatgaggagtcatttattaaaacgtatgttggtttccactttctccccatttggtgaaacagcatggctattatgggctggactcaggccatggctgccggccctgcaactgcagcgtggcaggctccatgtcagatggctgcacggatgaaggccagtgtcactgtgtcccaggtgtggcagggaaaaggtgtgacaggtgtgcccatggcttctacgcctaccaggatggtagctgtacacgtaagccttgatttccttgtttgagactttgtagtcattcccagagctttccttgggccctccctctacttccaactaattttggttaagtgcctgtactttttctcttctttccctggaggatttcataccttttttctggtttctggtccctatcagggtacaagcctaagttttggtcacggctctgccgcctactaattgtgggagcttagattcattacttaactttgcttggcctcagtttcctcatctgtaaaatggggatgctaatgagaatctgcattgagaagttagtgtaagtgttctatataaagtcctcagcatggcattgggcctgcagtaagtgcttagtaaatattggctccctctgtgatcacctagtgagggctttttcactcttctctatttcccctgtcctgtccccatttccccgcttccctcagcatctcctgagatggagggccggctacctccatgagacatggaggggtcttgggaattgtgaggtgtcttttaggagtgagaagagtggcttggactcttaataaaagggaaataacagcatcagctcttagccctttaatgacatcacccaaatctgtaacccagcattcatctttatttcagcctgtgactgcccacacactcagaatacctgcgacccagaaactggagagtgtgtctgcccccctcacacacagggtgtgaagtgtgaagaatgtgaggatgggcactggggctacgatgcggaggtggggtgccaggtgagcgctgtcatccacgctcttgcttaactgagagttgctttgctgtagcaagtttcaggcctgttcttctatatattttctggactttaatctgttgaatagttttgtgagtttaaaaaaaaaaaaaaagctcaatgtgggccaggcacagtggctcacacctgtaatcactgcactttgggagactgaggcaggaggatcgtttgaagccaggaattcaagaccagcctgggcaacaaagcaagaccctgtctttgcaaaaaataacgattaaaaaaaaatttagcctggtgtggtggcacacgcctgtggtcccagctacttgggagactgaggcaggaggatcacttgagcctagggattcaagtctgtagtgagctgtgatggcaacactgcacttcagcctgaacaacagagaaagactctatcttaaaaatcaaaaacaaaaacaatacaccttagtgcagatgataggaatcaaagtgaaagacacgacacccttaagacaccttattctaggttttcttcaagaacctagttgttacattgatggttagaaaaatccaaaaaatggctgggcgcggtggctcacacctgtcatcccagcactttgggagaccgaggtgggcagatcacaaggtcaggagattgagaccatcctggctaacacggtgaaaccccgtctctactaaaaatacaaaaaaaattagctgggcgtggtgatgggcgcctgtagtcccagctactcaggaggctgaggcaggagaatggcgtgaacccgggaggcagagcttgcagtgagccgagatcgggccactgcactccagcctgggcaacagagcgagactctgtctctctgtctcaaaaaaaaaaaaaaaaagaaaaagaaaatccaaaaaatatttgagtgtcctttaatatattgtgcaatgtatactatcttccaagagaaagtaataaatcactttattgggggtttatgtccaaaccatgaggcctccagttttctatgtagccttcttcagttaaatttgggtatagtttgtgttttggaaacaagaggaaattacttttttttttttaaattgagacaggatcttactctgtcacccaggctggagtgcagtgacaccatcaaagctcactgtatccttgacctcttgggctcaagcaatcctcccgcttcagccccgcaagtggctgggactacaggcatgtgctatcacgcccagctaattttttgattatttgtagagacgggggtctcactatgttgtccaggctggtctcaaactcctgggctcaagtgatcttcccacctctgtatcccaaagtgccataattgcaggcatgaaccactgtgcctggcctgatttctacagtaatttcgttagacttgttttgacctagtaaatttaatttcagttcacaattttggccccatgcgcatgtgccactaagatgcacagatttccggcaacacagtgcctgtctcctgttggcacatggcaacgtgaatccatgcagcaatagcaagagagagatggttcatttgtagaacttccccatatgtagtgttttcctgtaattcaaatatgtgcgcacttggaagcatcaaatctgcctttttattgagttggttttcccatctctcaggcctgcaattgcagtctcgtggggtcgactcatcatcggtgcgatgtggtcaccggccattgccagtgcaagtcaaaatttggtggctgggcctgcgatcagtgttccttgggttacagagactttcccgactgtgttccctgtgactgtgacctgagggggacgtcgggggatgcctgcaacctggagcagggtctctgcagctgtgtggaggaaaccggggcctgcccttgcaaggtatttaccatccatcctcctatttcatcctgtctctggctcctcatcatgactcctgggctttgactacttacctaagcagccaggttttggatgcttttcctagtgagttcacactcccttccacatctgagttcaaagtctcttatgctcctctagagtgatggatgatttttgaaattgaatttttactgttacaagtgtcagttgatggaaccgatttgaaaactgccctgaagttttaatcatatatcccagaggctgagtggctgtgtatcttgagtatgcaggtgaggtaggtttctcagggctttgggatttgtgatgtgatccctgtgaggttattgggctcccgtatgtgctggccacattgaaggaaatcggggtttattattttcccaagaggtaagacttcaatgtcattataagttttgtgtgtttccgttagttttcccaatgtgctttgctgttaggaggtcagagccacctcctctggtccttttcccatgggtggtgagatgggagccctctggcttgatgatggtaattagctgatgggtgactggagatatgaaggaaaactcatgtagatatcatggcctgggaataatggaagcatcagtctccccgttttcggccttatttatttatttagagacagagtctcactctctctctcaggctggagtgcagtggcacaatctcggctcactgcaacctctgcctcccgggttcaagcaattctcctgcctcagcctcccgagtagctgggactagaggtgcccaccaccacgcctggctaaatttttgtatttttagtagagacggggtttcgccatattggccaggctggtctcgaactcctgacctcaggtgatccatctgcctcaacctcccaaagtgctgggattacaggtgtgaaccaccgcgcccagactctgccacatcttataaggatatctgctatgattaactacaaaagaaacacgacgtcttttaagaatctctatgaaaaaataccgttatcacctccttcattgctacttcttggtacggtctaggtccattcattgggggtggtgcgtccttgtagatgacttggtttctgatgccaacaccttttatgaaaacttgatgctcaaaattggggggggcgatgccatccaaaaaataaaaagccaccctgtacttcagtttgccaccataagccatgagcgtatcaaataataaagtggtgtttacttctttgacaaagctttcccttcaaaacaatttattggaagaatgcccccatatgataaaaaacttgtttcttaaaannnnnnnnnnnnnnnnnnnnnnnnnnnnnnnnnnnnnnnnnnnnnnnnnnnnnnnnnnnnnnnnnnnnnnnnnnnnnnnnnnnnnnnnnnnnnnnnnnnnnnnnnnnnnnnnnnnnnnnnnnnnnnnnnnnnnnnnnnnnnnnnnnnnnnnnnnnnnnnnnnnnnnnnnnnnnnnnnnnnnnnnnnnnnnnnnnnnnnnnnnnnnnnnnnnnnnnnnnnnnnnnnnnnnnnnnnnnnnnnnnnnnnnnnnnnnnnnnnnnngattcatcccgcactttggaaggccaaggtgggtgaatcacttgaggtcaggagttcgagaccagcctggccagcatggcgaaaccccatctctactaaaaatacaaaattagctgggcatggtggcgggcgcctgtagtcccatctactcgggaggctgaggcaggagaatcgcttgaacccgggaggtggtggaggttgcagtgagccaagattgcgccattgcactccagcctgggtgacagagcgagactctgccttaaataataataataataataataataacaataataatatttatcacctggccggtggcgcgcacacccagggattatcagaatcacctggagactcgaggcggcttccagagttgtctcaggacattctcatcagggactctgtattttccaaacgattccaagatgattctgataatcatctgtgtttgagaatcactgattggatctttgagaaaactgacactcagaaagctcagggcctggctagaggaaactaatgtttgtgcatctataattatgtttaaaattatgtttgtgttctattttgtctctgtttgttcagaaatcacatctcttttctaggcaaaaatgagtcctttatttgctcccctttaggagaatgtctttggccctcagtgcaacgaatgtcgagagggcacctttgctctccgtgcagacaaccccctgggctgcagcccctgcttctgctctgggctgtcccacctctgctcagagctggagggctacgtgaggaccccagtaagtcacacacagccaaaacattctgcttctaaccccactcccctgggaagtgggtgggggtgggaaacacagccaagtgttcacattaaattttgctcttatggcatccaaaattctaggaagctaatttgggttagaatatgaatcagagctcagcttctgctggccgaggaagtaaatggaacttgaactaaaggctgtccatgttgttccttagctaatctatgaaaagctttcattggggagaaaatagaactgcaaaatctcagccgtcttctgcatatcattgaacgtttccccagtgtagcaacagtttggccctaaatggcagtagtttaaagcactttcagttcattttcttccagatgtttagtttaaaggaaaagtctttactgtttctgttttaataatgaagctgtttcatctgtgaaacaatgatggaatctaaagaatgaaactggagtggaaagttcgcattttgaagtgcactttcccctccttttgtggtttaggtaacgctgggctccgatcagcctcttctgcatgtggtttctcagagtaacttgaggggcacgaccgagggggtttactaccaggcccccgacttcctgctggatgccgccaccgtccggcagcacatccgtgcagagccgttttactggcggctgccgcagcagttccaaggagaccaggtgaggtgcacacccagccgagagccagtccgtgcttcctaggatatacagaaattgtttaaaatcaccatagtctgggccggcctgtcatttaaagaagtagttattaatttcctcttttaagtgggatcagagaagtttaatgctcataaaagtctcctcaaatatatggttccttaaaatttttcattaattttaaaagttttttaagttcacgttatattaatttggttcttcctaaagcagtcattcaacaaacatatacagtcatgtgtcacttaacaatggagagacattctaggggaatgtgtcattaggtgtgaacgttattattataatctcatgagaccatggtcatatatgtggtttgtcattgactgaaatatcattacgtggtatgggacccactgtgtttactgatatgctcttggtacaaacctaggtgctatggcctgggagtcccctttcaagaaattatcactcatttaggggggaaaaactactataaaagatcatgaaaggcatcacttggatttttgtttatataaacattggagtctgtgtgtgaattcaccctgatctttacaatttgcaaatatgcacccagtgctcctggagatagagaaatttttaatctaaaggggcttgaaaataatttgcatcactaccacattgatttgttattttggagctcacttttgtttgttttctcgaaaggaactatataacttaggtcaacttaataatccataattaaatggaattagaaggaagcaaattccagacaataaatttcacccatgtgatgtatttttaagatacaagatttctctcatatggtggcagtcttgcaataaaatgtttttaagtgaaagctttgtcagagaagtaaacaacactttattatttgatagctcatggcctatggtggcaaactgaagtacagcgtggccttctattctttggatggcatcggcacctccaattttgagcctcaagttctcatcaaaggtggtcggatcagaaagcaagtcatttacatggatgcaccagccccagagaatggagtgagacaggaacaagaagtagcaatgagagaggtgataatgggatcttttcatagaagttccttaaagacattgactttgctatggatgtagtgaaagatgaaagccattaataagagaatgagcagccaggtacggtggctcacacctgtaatcccaccactttgggaagccgaggtgggtggatcacctgaggtcaggagtttgagaccagcctgtccaacatgatgaaaccccgtctctactaaaaatacaaaaattagtcagacatggtggcgcacacctgtagtcccagctacttgggaggctgaggcaggagaatctcttgaacccaggaggcggaggttgcagtgagctgagattgtgccactgtactccagcttgtgcgacagagagactgagcaagaagaccctgggatcaaaattccagtgagattagcaagatctccaaaaacagtttgaatttcaaattctcaagaaatgtatattagttttatgtcaatttagtgggcactgcatcttaaattctttatcttggcgtactattttcaacctgcatagagatagtggtacaggagactttggacttgctcagatttgggaagtgtttattcttccagcagatgtttactggatgttcgctgtgtggctggcactgccttaggtaatgcatatctattgataatgggactgacactgcgcctgcccatggaggtttcaggaggtctttatcagttacactcagcggcatgcacagaacatggctcatttctggagaaatttataaaagaatttattctttataagttttatgcctgtcagaatttggcctctgagcttaattgaatgtgtctctcattctacagaatttttggaaatattttaactctgtttctgaaaaacctgtcacgcgagaggattttatgtctgtcctcagcgatattgagtacatcctcatcaaggcatcatatggtcaaggattacagcagagcaggtacttggagcttctagaattttgaccgttattttcatatttgaaagcaaactgaaagaatttgactcacttcacttccattacctactatttttattaatccatgtggttcagttccttcccaaaacatttttaaatattaatatcattatggaatgtgtgaattataacttaaagtatccacctagcatgctaatgtcgatataaaatataaggacataatggtggaatcttagctgaagataaaatgcaaaaaaaaaattgctatttctgcacatgaaaactgaaatgcccatgtcttcgtaatgatgtgtaaagaatgctgtcacctactcatctaatactttagcccataaagaaagccattaggtcttggccaaatcagcacttcaagaggtcttttaggtgtacttgtgtcacattatttttaaattctaaagtgtctaaagtgtgtcatgacagttagtaatgtgctttaacacacttcacttataatcacaagcaggaactactccaaacagggaagaaagctctggtttcatatatatgcaagtgttaggtcatgtgctatgtttctagaaagtttttcaaatgttagcgtttcctctcttaacatgatggctgcacagaatctcagacatttcaatggaggttggcagaaaggctgaaaagctgcacccagaagaagaggttgcatctcttttagagaattgtgtctgtcctcctggcactgtgggattctcatgtcaggtacggagactctagtcgaaatctatttcctgggtttgagttgaaatgtgcttgttacagcaactccaagagatgaacagaacttatgtgtatctactatatcatttttttctctttttgaattaaaaagaaattaattttggtaaaatgtacataacaaaatcttccatcttaaccattcttcagggtacagtttagttgtgttaagtacagtcacattgttgtacaactgtcaccactatcatcctcagaactttttatcatcccaaacgcaaactctgcactcattaaacactagctccccatttcctctctccccagtcccccacaaccaccattctccttttggtctctatgtatttgaccactctatggccctcctatatgatgtatataatacatggcacatgcctgtaatcccagctactcaggaggctgaggcaggagaatcatttgaacctgggaggtgaaggctgcagtgagccgagatcatgccattgcactccagcctgagtgacagagagatactccgtctcaaaaataaataaataaataaataaataaataagtggagtaatacagaacttgtctttttgcgaatggcttgtttcacttagcataatgtcctcaaggctcatccatgttgtagcatgtgtcagaatttccctcctttttaaggctgaataatattccattgtacatacatgccacatttnnnnnnnnnnnnnnnnnnnnnnnnnnnnnnnnnnnnnnnnnnnnnnnnnnnnnnnnnnnnnnnnnnnnnnnnnnnnnnnnnnnnnnnnnnnnnnnnnnnnnnnnnnnnnnnnnnnnnnnnnnnnnnnnnnnnnnnnnnnnnnnnnnnnnnnnnnnnnnnnnnnnnnnnnnnnnnnnnnnnnnnnnnnnnnnnnnnnnnnnnnggaaacgggggacccccccgagagctcaaaaaaagagaacgcttgggttccgattcggccccgtgcgggaatcccttaggaaacacctacaccattgttgtattgcgaaactggctccctgggttggaagcgtgaccagggtcattcttggatcgctccgtcttggatgtccaaagagcgcgatattgtattgttttcttttgaggaggaaaggatagtatgttttattgcatttcatctctcacacatacaggtcagttctcccattaccgtaattttgtttttttttttgatactttacgctacagtgcggggcatcacctgtgtttgtcattgcattcttgatagaggtgaactctttctatacctggcacattgttgtctccttgggaaacgaactctttctagagataaacttgcttctctcatagcattctcttctcctcagacttgcccctgggtaccacagagggaagctcccagcagggagtgacaggggaccacgccctctggttgctccttgtgtgccctgcagttgcaacaaccacagtgacacctgtgaccccaacaccgggaagtgtctggtatgctggtttgtgggggtgcttgcctgagtttagaagtaaagtggatgctgagtgtcagatttctggtctaagtcatagccgtgccttggtttagtgaggggttaaatttagctaaatataaaatataaacctatttccttgaggacggcatagcttagtggttctgcccttatcagtggaaattcttttataaattttcctttcttgatgaatttatctgtgggcatcaatttgggaattatagtcatgcaccaaataatgacgttttcttcaacaacagatcacatataggacagtggtctgataagactataatactgtgtttttactgtaccttttctatgttagatatagttagatgcacaaatatttcctattgtgttgcaattgcctacagtattcagtatggtaacatgctggacaggtttgtggcccaggagcaataggctctaccatatggcctaggcgtgtagtaggctgtgccatctaggtttgtataagtgcactatatgacgttcacactgtgacaaaatcagctagggatgcatttctcaggcagtatccccatctttaagtgatgcatgactgtagttgcatgccttgtttttaattgcagtactggttgctgtagtgaaaatagatgagaactgtatacgatgaagtttgggggctcacgtgggaattttaaaataagttaatgccagtgtcgaaaatgtatttctctgtgtaaagtattgccctctccttgcatttttttaaaaaatgcatattctctaggggatgataacagcacattattcacatgttagtgtgtgtttgcttctcagccaccttctcttaggccaagattggtctcggggacacatggagagctctgaccactgtaaacgactaagcggcccagacagaagcctcgcagccctgaccgaggacaaattcctgtgtccatgatttagcttaagccaatgaggcagataacaaaataatgtgatattcgtttcctactcctgaaagctcatgctttacagtcactcaggtggaaacattgattactaattgttccaagattaactcgccttgggtaaaataatgcattgaagggaaatgagctgcccaccaaggacacacccgaagccttggagatcctgggtgtggcccaatcacaaggaaacactggagccaaaacagaggaattaggactgcaggctcccaacctgcctcccgccacattttgattctggttttccctctttttgacaattcctgtcactgaaacccattataaacaaaaaatcgtgtctgggcttggaggatgggatttcagggttgcagtggtccctctattcttgtcagagtcccttcagattttattattattattattattttcaagatggaggcttgctgtgtcacccaggctggagtacaatggtgcagtcagctcactgcaacatctgcctcttggcttcaagcaattctcctgctcagcctcctgagtagctgagattacaggcgcctgccaccatacccagctaatttttgtatttttagtagagacagggtttcaccatgttggccaggctggtttcgaactcctgacctccaatgatccacctgccttggcctccaaggtgctgggattacaggcatgagccatcacgcccggctgtcccttcgatattaagtctgaactatagcagccgtgcccggcagtaatttagtgtacattttacacacctgcaacaatggggcgcnnnnnnnnnntgtgtctgtcctcctggcactgtgggattctcatgtcaggtacggagactctagtcgaaatctatttcctgggtttgagttgaaatgtgcttgttacagcaactccaagagatgaacagaacttatgtgtatctactatatcatttttttctctttttgaattaaaaagaaattaattttggtaaaatgtacataacaaaatcttccatcttaaccattcttcagggtacagtttagttgtgttaagtacagtcacattgttgtacaactgtcaccactatcatcctcagaactttttatcatcccaaacgcaaactctgcactcattaaacactagctccccatttcctctctccccagtcccccacaaccaccattctccttttggtctctatgtatttgaccactctatggccctcctatatgatgtatataatacatggcacatgcctgtaatcccagctactcaggagactgaggcaggagaatcacttgaacctgggaggtgaaggctgcagtgagccgagatcatgccattgcactccagcctgagtgacagagagatactccgtctcaaaaataaataaataaataaataaataagtggagtaatacagaacttgtctttttgcgaatggcttgtttcacttagcataatgtcctcaaggctcatccatgttgtagcatgtgtcagaatttccctcctttttaaggctgaataatattccattgtacatacatgccacattttgcttattcgttaatctgtcagtgaataaacttgggtggcttccccatcttggctattgtgaataatgctgctatgaacataggggttcaaatatctctttgagattctgcttccagttcttttggatatgtacccaaaagtggacttgcagaatcatatggtacttgtattttccatctttggagggatggaaatggtatagctactggtttttactgtgccattttccattctcaccagcagtatacaaggtccagtttctcaccaatacttgttagtttttttttttttttgatagttgataccctaacaggtgtgcggtggcatcaccttgtgttttttcatttgcatttctctgatagagatgttgaacttcttttcatatacctgttggccatttgtatgtctcctttggagaagtgtctattcaagtccttcactcattaatcagacatttttgtcctcccttttgcatcccctcaggactgtgcccctgggtaccacagagggaagctcccagcagggagtgacaggggaccacgccctctggttgctccttgtgtgccctgcagttgcaacaaccacagtgacacctgtgaccccaacaccgggaagtgtctggtatgctggtttgtgggggtgcttgcctgagtttagaagtaaagtggatgctgagtgtcagatttctggtctaagtcatagccgtgccttggtttagtgaggggttaaatttagctaaatataaaatataaacctatttccttgaggacggcatagcttagtggttctgcccttatcagtggaaattcttttataaattttcctttcttgatgaatttatctgtgggcatcaatttgggaattatagtcatgcaccaaataatgacgttttcttcaacaacagatcacatataggacagtggtctgataagactataatactgtgtttttactgtaccttttctatgttagatatagttagatgcacaaatatttcctattgtgttgcaattgcctacagtattcagtatggtaacatgctggacaggtttgtggcccaggagcaataggctctaccatatggcctaggcgtgtagtaggctgtgccatctaggtttgtataagtgcactctatgacgttcacactgtgacaaaatcagctagggatgcatttctcaggcagtatccccatctttaagtgatgcatgactgtagttgcatgccttgtttttaattgcagtactggttgctgtagtgaaaatagatgagaactgtatacgatgaagtttgggggctcacgtgggaattttaaaataagttaatgccagtgtcgaaaatgtatttctctgtgtaaagtattgccctctccttgcatttttttaaaaaatgcatattctctaggggatgataacagcacattattcacatgttagtgtgtgtttgcttctcagccaccttctcttaggccaagattggtctcggggacacatggagagctctgaccactgtaaacgactaagcggcccagacagaagcctcgcagccctgaccgaggacaaattcctgtgtccatgatttagcttaagccaatgaggcagataacaaaataatgtgatattcatttcctactcctgaaagctcatgctttacagtcactcaggtggaaacattgattactaattgttccaagattaactcgccttgggtaaaataatgcattgaagggaaatgagctgcccaccaaggacacacccaaagccttggagatcctgggtgtggcccaatcacaaggaaacactggagccaaaacagaggaattaggactgcaggctcccaacctgcctcccgccacattttgattctggttttccctctttttgacaattcctgtcactgaaacccattataaacaaaaaatggtgtctgggcttggaggatgggatttcagggttgcagtggtccttctattcttgtcagagtcccttcagattttattattattattattattttcaagatggaggcttgctgtgtcacccaggctggagtacaatggtgcagtcagctcactgcaacatctgcctcttggcttcaagcaattctcctgctcagcctcctgagtagctgagattacaggcgcctgccaccatacccagctaatttttgtatttttagtagagacagggtttcaccatgttggccaggctggtttcgaactcctgacctccaatgatccacctgccttggcctcccaaggtgctgggattacaggcatgagccatcacgcccggctgtcccttcagatattaagtctgaactatagcagccgtgccaggcagtaatttagtgtacattttacacacctgcaacaatggggcgctcgctctcaaaacagctctgctcatctttgggcagctctgattctttctaagccagtgcccctgaccatgcatctgttggtgcagttttattctttggagctgttgagataaaccatgagttcagattattcatgaaaagtgatgggatcttaacagataccttgggaaactacttgatcaaatccctctttcccatgtccaaaggccctgaatcttcagccctccaagtcacgtaccctcacatgcctggaggccagatggagtggtcgtgggtccattcaccagcctgtggtgtgcatgtcactgtctgtcttcggtatcctgccctgagcctaacgcctttgctcccggagtcagtgggagcttccctccttaactcgaggtgctgtgtctccatggcacagcctggacagggtagtcatacccgccctgtcactgctgcctcacggcattgactagacacaagacccttgaactcttcccatcaatatagcgcctcagtcccttcttccttgctctttgagctcaggaccttcccttccatcctcagttttttgaatccttttgtggtttagtgcagttcatttcccttcaacataatctcctaagcactccccctgtgcttattgtacaggtagatatgaagaactttttggatctgattttgtcattagtatataggatgttcaggtcactgagcatttggtgttatcataaaaatgattggggccgggcgcggtggctcacgcctgtagtaccaacactttgggaggccaaggtgggcggatcacctggggccgggagtttgagaccagcctgaccaacatggagaaaccccatctctactaaaaatacaaaattagccaggcgtggtggctcatgcatgtaatcccagctactcgggaggctggggcagaagaatcacttgaacccgggaggcagaggttgcggtgagccgagatcgccccattacactccagcctgggcaacaagagcgaaactccacctcaaaaaaaaaagtgattgattggaagtatgacgtggaaggggctggggagactgaggacaagggcggtagcttgggagctcctcttcctggttacccactccctaccactgccttctgggagatacgtctgaacctttttacatcagtgaaatattggcaggcattctctgtgcatttcccatagcaactaattcagcccacactttggttctcattagggggtccttgtttccctgccactcttggggcagcttgtctttgcttctctagggaacccacagtctgtcgtaagtcagggggagttggtgttagccatggaaaacctgaaaatcttcaattctctctcatcatctaatatttattccttgtcaggtttaggccatgccattaacacatttacttttcaagagagagattacaaattttacttctacagagagatgagtttgagaggtcaggtagatcccagtaaaatttatcctcatcagggaaaaaaataggaatagaactttaaaatgaaaaatactagaattttaaaaacatttaaatgaacttaaaatagtcttttttaacatgtaacaagatgtctttctgtatcacctctcactgccaaggataaaagtgtgagtcagcctgggagtttgctcaggggttcctcactgatcctggaaacctattcagctgcatcagacatggaatcttgtgcccagtggctgagtaaatagagatgaattgagcaaatgccaatttcaaattggaatcagatggcaagaactgcttgttcttttagctttaaaaatgtatacctttttggccgggcacggtgcctcacacctgtaatcccagcactttggaggccgaggcgggcagatcacaaggtcaggaaatcgagaccatcctggctaacacggtgaaatcctgtctctactaaaaataaaaataaaaataaattagccgggtgtggtggtgggcacctgtagtcccggctactcgggaggctgaggcaggagaatggcgtgaacccgggaggtggagctcacagtgagccgagatcatgcctctgcactccagcctgggtgacagagcgagactccatctcaaaaaaaaccagaaaacaaaataagtgtaccttttttaatagcaagaccgtaggtccaaaggatgatataaaatttaactggaaatgccacatggggtggctcatgcatgtcgtcccagctacttaggaggctgaggcaggaggatcacctgaggccaggagtttgagatcagcctgggcaacatagcaagaccccctatctgtacaaaaaagttaaaagttagacaaacatggtggcgtgtgcctctggtcccagctactcgagaggctgaggcaggagaatcacttgagcctgggaggtcaaagctacagtgagctatgattgcaccactgcactccagcctgggcaacacagggagacctcgtctctaaaaaaaaaaaaaaagaaaaaaattaactggaagttagttgtgggttgcagtaatctatcagtggtgctctaaaaccatgagttttcttccctcattgtctatttcctaaatcatctatccattcttcaactccttacatgtggttgttgaaccctgcctgtgtgcaaaactggtgcttcaaattgttttttggggcactaaatattttaaatctatgttttaaggttctgcaaactgcttttagggctcctgtgtctattttccttaagaagaatgtactagtaatttcttggctgtattggataaatgcagccttaggatgaatgaaagccacagagcgggaaatgttttcaggattttaagaatatggaggaaaatgctcccctttcctgaagaatatttttaaaagctagctgacataaaacatggcagtgcttagctattaccagataagaatgatttctaacaatttcccattttttcccccctcctttaaatgtgggctcccagaactgtggcgataacacagcaggtgaccattgtgatgtgtgtacttctggctactacgggaaggtgactggctcagcaagtgactgtgctctgtgtgcctgtcctcacagccctcctgccaggtgagtccccacaggtgcagctggcatgctgggctgcccagggctgcttccagttcagcctcattttcaagggtctctgagtggtctgttgttaatgaatattctccattggttgcaaaaggctaattttaagaaaaggtgttcattctcaaaagcattggaagagaatcttttcaaaagcaaagtatctgttttggtattggatgtttggatggaagcaattaaagaaaggacttttaggttttgttttttaagactcattttagcccacagcatatgtatccaatctgcatggagataaattattattaattttattgataatgatacaaaagaacccaattaccatttaagggaatggggttagagtttatataagctggtgcctaagtgctgaaataccacatggtgataaaattgggactagtttctaccttgtacttatgatgcttgtacagaattatctgaatgcaaaagggaaccagaaattttaagtgggaattagaatatcaaagaatcctctttggttcaaatgaaaattataactcatcaataatattttattattgcttagaatatttggcaaggtattgaacatataaagatcaaatgttaacttttggtatactgcaatgaagtattccttttaatatttgtctgaatcttctgttttttattgcctccaagtaaatgatgcctgatggtgagtaccaaatgagaggcactatgtacactttccttgcaagctatgaagcatcctaaaatttgttgttactagtgcttattttttatattaaatgtatatatataaattttgacttgtcaattccacttctgtagtctgtgctatagaaatacttgcatgtgtgtgtaaagatggatgtgtttttgcattgcttttactcatggggaatagggggaaaacggaaatatctacttacggggaattgattatatacattgtgttacattcctagagtgaaatattttacaaacacggagaaaagaataaggtatatctgtaggcacagaattggagaaatggccaattgaagtatgtaattgaatatggagtgtgatgccattttggaaaaaattcatatccacatgtctattcatacccatattataggtggctatatgtgcccagagaagtattgggaaggacattctaccctactactttgcacgtttctgtgctgtttgaatattttacttcttcaatcataaaaaggttataaacatccccaaagtccgcattaataaattaaagtttgtgctatcaggaagagattgtcaggatgtgaacattcttgtgtgctctgaatctcagatgccctaaaacacatgctttattttctacatattttgtttccactgaagtctatccctttactattttaaggaggaaaaagagttggaagtggtatggggctgataactgacgctggaaacttcatcttgctaacgaaaaggaaccagacttggctctaactggttttgttttttattgttgtctccagtagtttgcatgcacccagctcagcctctaggtggcacattggtaatttaaaacgtgaaggcagagggtagaggatgttgagaaaaaggagtaaaacaaaagcagaaatccatgaatgaggagatcaaatcccagtcaatgattaaactttgagagggtctgtcattttgcttatggcagcctaccacataactccctgcctgcctttaggtgcatcagttctccagttctgccctatttccttgcctttgcttccctggcttgccttcctcgcctttcattacagtcaataaagttcttttcgtcagcgtgtgttcagccatcttccctctgctgtttttcatgcttgctcatagttgtttcagctctcttaccaccttatcacttagtaagcaaagaccctttttccttgggacactctcttgttgggtggccaattagtgataatccctaaggtcagtcttcttccacttaacattcacatgattgtccctggacagggtcttatgaatgtcttttggatacaagatgtgtgtgcacttactgattacttttattttccttctttttgccaggtagattgtaagctctaaaaagctatgtgtaatcacgtaactttgagaccagtatggtgtatcctaagagtaatgaataagtaccttaaggaaagatggaaattgtatatctgaaaattcaaaacgaaattcttttcctccagttttagtcccacttgtgtcttggaaggtgaccacgatttccgttgtgactcctgtctcctgggctatgaaggaaaacattgtgaaaggtacatgggtggattgtcatgtggaaatccctgggcactctgtttcttttataaggtattgggcatatttactatagtaatctgggagccattatcaattatcaatttggatgtgcttgattgaaataggacctcattactgttccagaacaagttttcccaaggtgaatggatctgtgctttgcatttcatttggcagaaatgattactgtcgcgagttagaagctggtattgaccatcctgtctgcacctatgtcccttcctttctgtaggtgctcctcgggctattatgggaaccctcaaacaccaggtggcagttgccagaagtgtgactgcaacccgcacggctctgtccacggtgactgtgaccgcacatctgggcagtgcgtttgcaggctgggggcctcggggctccggtgcgatgagtgtgaaccgaggcacattctgatggaaacagattgtgtttgtgagtatttctcctctaaatgtgtaaagatggtttttcctcccaaatgtgtcgggaaagaagtggtgacggcacactaaagtgtctgcagaataaaaacatcctattttattttcattttcttattttctaagcatagatcactgttgcatctgctgaactgaacctttcatcatgtgttttccagctgaggcaggaggttctaagatagcagtttattcctctggcactcagagcagcacagtgatttcaactttctcgtttagtggcattaatatttcctttagtggagccaggagtgatttagtgcaggagaggaaacagctttgtggggttgtcatttgtgttaccccaatttcatgatagcttccactcgtgactatcatggatttaaaaaaaaaacaaaaacaaaaaaatggagtcttgctctgtcccccaggctggagtgcagtagcacaatctcggcttactgcaacctccgcctcctggactcaagtgattcctctgcctcagcctcccgagtagctgggatcacaggtgtccaccaccttgcctggccaatttttgtatttttagtagagacagggtttcaccatgttggccaggctggtcttgaactcctgacctcaggcaatccacctgccttggcctcccaaaattctgggattacaggcatgaaccaccatgcccggcctgttgtgggcttttgtaaactttttttccagttctgatttattctaccagcaagtgcatgagatagtcagcttgggatgtcttctcaggggttaatggggaagatacggaggcctgttaggaccatggcattggaggtcttttttgctttgacttttgtgtgggttataagcacacacacccccactattctctccagtgtccttcacttgtacttgcgaaagatgcatttgcaaactgcctgaggaggtgacagagcaggctgtggaagggaatactgggattcagtgcagtgggtcctagttaaagatgagccaggcagcataaagatgggggcagaagaatgaaatgtgtgccataactccctgcctgtctttaggtgcatctgttctccagttctgccttacttccttgcctttgcttccctggcttgccttcctcgcctttcattacagtcaataaagttcttttcgtcagcgtgtgttcagccctcttccccctgctgtttttcatgcttgctcatagttgtttcaactctcttaccaccttatcacttagtaagcaaagacccttttgcttaccgggcgcccctcttggcctcagctgtttctttctgtgtgacctctcggaagttacttatctgatctgagtcttggcgtcatcattgaataggggcctagcacttcctgccgtgccacccatggcacagttggagtgagaacgagatcagatgtggtgcacggggtcttggagtgtactctgaccgcatatgtcattttcacaaaacaacttacgcaactccatgaaaaaatgggcagaccacatcgcattaactttaactctcctttttaaaaatttgtcttgtagcctgtgatgatgagtgtgtaggtgtgctgctgaatgacttggatgagattggtgatgccattctttctctgaacctcactggcattatccctgccccatatggaattttgtcaaacctggaaaatacaactaaatatctccaggtaggtactggaaatacagagatgaacagacacttgtatcattaagggatatagtcagtgggaatggtgggagtcattccatgtgtcctccccacagtgtgagagcccaacttccatcagcccctgagggcaggtgtccagtctttccttgactgtgaccagtgacaggcacttacttacttatctcacacgctagcttgtttcacggtgggacagctctcattgtttcagtgctctctggaggactcctcatcaatgctgccctctgtggccctcattctgccttttgggataagaccaagtccacttgctcttctgtaagacaactttgggtatttgcaaacagctgccctattagaaaagcagaaaataggccaggcgcggtggctcacatctgtaatcctagcatcccagcactttggggggccaaggtgggcggatcacgaggtcaagagatcgagaccatcctggccaacgtggtgaaaccccatctctaccaaaaatacaaaaattagctggatgtggtggcacgtgcctgtagtcccagctacctgggaggctgaggcaggagaattgcttgaacctgggaggtggaggttgcagtgagccgagatcacaccactgcactccagcctggcgacagagcaagactccatctcaaaaaaaaaaaaaaaagaaaaagaaaaagagaagaaaagcagaaaataaatctgaacagtatcttctttaaggtatattattttttaagtgtattattcttcacttcactaaagttgcagggcacaaaaactctcctccctggaagactacattaaatatctggcagtaaatcatagttttatgttttcatcaacagggcctgggtcaaaaaatgatgaggagttaagaaattaacttagtagacagcatcctactatagcacttatttattattattattttatttatttattttattatttttttgagacggggtctccctcagtcacccaggttggcatgcagtggcgcagtcatggcccactgcagccttaacctccatagctcaagggatcctcctgccttagcctcccaagtagctgagactacaggcacacaccaccatgcctggctagttcttttatttttatttttaatagagatgagctctcactgtgttgtgcaggctggtcttgaactcctaagctcaagagaacctcccaccttgacctctcaaatttctgggattataggcatgagctaccacgcccgacctacttttaattctaattggaaaacaatgtgattcttaaattttgctttatatatgcgttagaatttgacataatctatgcggtgcgccaggtagcaataaaagggatggccattcctaaatgccttttcttagataagagttttcctcaaacttagcacttccttaggtgtgtgcgtgtgtttatgtgtgcgctgggatggggctggttcttgaatccatcttgatttgcagtggtcttttctctataatggtagttaagaaagattagggacctctaagagatgtttttatgttatactttcctcaaacgtcacaaagtgtttttgaaaaatgagagcttttacctctataaaaaaaagaatatttaacttttttttccaatgactatatacacgatcagtatattatctgccagtcttggtcccagggatataactattttatatatatgaaataagacaaatatttgatttaaattttaactcattttgaatgatttgctctaaataaaccacttgtccgttttctttaaataactttttgtgtttatgtaaagtattcatcaagttttaaggtttaaataaaattatacaagaaattagaaggctgttggcataaattaagcactttattcttctttatttttagtatttataaagtctttctttattgaattcttttgtagtttagcctaaaaggcatttttttcttaggtgttgcaattatagttaaatttgtttgactctgctattgagataaagccagacttttatctgagaattgcagcagtatcagattctgctgaacacaacagattttaaatttatatctatatcagaaatataatgcaaaggatggcagtgtagaatcatgtcgctatagtcgaaacctaagtaaatgtgatccatttttttttaaatgacagttccaaggaaagaagaatttctttctgtgaacaaaaaagaaatgcaagtgcttcttagttaagaatcagaacattttacttcgaagcattgtaatttgtttcctccattcttcctaggaatctttattaaaagaaaatatgcaaaaggacctgggaaaaattaagcttgaaggtgttgcagaagaaacggacaacctgcaaaagaaggtaaattctttccataaccaaccaaccttcctcctggtccctcccatcagccctcctgagcagttgccttggggctgtctggaaggttctgattagatcatgccagcctcttcctcccacgagctgtgctccaggtacttaatcatcaaattggttttgaccctgccagtttctgtggtttagtgggaaaaggctcccgacttaatgtctgttgtcatctctgctgaggacagagttgggcagtctcttggctctgactttcattttctcctctgaaacaaaggtggggcggggatgaaaagattgctgaggtttcttccttctcctaaattcattcagtaacgaagtacacggtgagcccaaaagcacggactgaacatcagtaatgctctctgcagcttgctgggtggagcagggagggcacagacctcatgatgaggcgtctgtgcaaacttcaggcttcaggctggggtggttctgattttagggccctgaatggcaagtgagcttgtttttctgtcatcagggaattatttattctgtttagcctgtgccagaggaatggcatttagtgacctaaaaaagaatctccccttctgcagatggtgaggaaggattattgtcaaatttactgttttttcatttatgaattttgtatgtgtgtgtgtgtgtgtgtgtctgtactgtgatggtgtatctatacgtatggatgtctaatctccatcaacacatgcacacatacacaaacatcaccctaggaagtatagtttggctcctgttaatttagaattaacgatgttttggaaagagttgaagggtttaagtttgggtttaagtacctcatcaagcaaacatttggttggaaataagctgattaaaataaattctctgtatccgttaaagaagattctctttggtcttgactagaaaacaccaaactcagactgggttactctacattcttggaaattacaaacaacctttcctttaacaaagagtaaaaatcccagtagaaataacagctgaggacagctaagtgtcagcctctgggctgctgacttcctggcttttgtcttgtgtagttctcgtagcagccctgggaggtaagcgttgctgtttcccaagtgttacggacaatgcttggagatgtctgggcctgtccacagcctggcagaatcaggtctaaaatcagcttgcctgactccgtgttcttaactcctagagactaacatctcataggccatacaaatcagtaaggtttactttctatattctgtatatttgggttttaaagtgaatcgagggccctcacagtatagccactaggagaatctgtagtttaatacacaattagcctgcttttaaaaacatacccatcttttcttatgctgagtgagttgtaaattatttcattaactacttagtccatttctaaccccaaaatattaagctcagcttgcatgataatgctaatctttactctatattctggaatatatgttgttgcttataagcggcaacagtggaatattacaacttgcgtattgtttaaagtcaaactaattacttaaagtcaaactaacctgagactttatttttccaccagctcactagaatgttagcgagtacccaaaaggtgaatagggcaactgagagaatcttcaaggagagtcaagacctggccatagccattgagaggctgcagatgagcatcacaggtagtgtgggcagtgtctagtttgaagtatctgtgcttatctagtaagaagtcaccattgctttattaaacatatgaatggatgtatatctcttgcatcgggtttccggaaccagaggggctggaatagtttggggatcctgagatgtgcaaactttagtctttgactgagagttttagctttaaaaaaatgcatatttctctttttattttctgcattatgcctaaaacttagatcctaattctcaagccctgttatggtaaagttagtatggtagctctccatccatttgcccagaataggagctgacaggatttgggacttcagttaggtaccaagtatagccatcatattagaataatttaatcacttctcagttgggtgtgctgtggcttttagcatgctattttcagttttctggctaccagaaacatatgatcgctcttctttttgtattatagtataagggcttaaaaagtacagaatccaataaaaatcagactttatagggcaaaaggtaaggaaattattagaacaaagtatgcttaataaaaaaagtaggatcaagcattggtggtttatttatgtagtaaatatttattgagaacatttatttttcatgtgcagatgtctctgccaggtacaaggaaatgctgaggttgacaccatgtccttgcctttagggagtttattggtgcatgagaagactttgaaatagaccagtaatcccaagttcatgaatgtttagttaggggatgtgcagagtacactgggatatgccaggtggcctggcctgacatggaggtccaactcagcttaggtaacagagcagtcctcagcagagaagtttctaagtttttcacttggtactagccacttttgagaggcttattaaataattgatgaattttctccatagaaattatggaaaagacaactttaaatcagactttggatgaagatttcctactacccaattctactcttcagaacatgcaacagaatggtacatctttgctagaaatcatgcagataagagacttcacacagttgcaccaaaatgccacccttgaactcaagtaagttcctaattactgttcacaatgcaaccaagtagagagagaaacttgcacgctatctccaaaggagaaggaggcatcgtggaagaaaagtgctcactggaaatgaaatatcctaagagaggagaaggggccctgtggtcaagtaaatgaagagatgggtactgacccctccaaatatagaaaggtgtaatctgtgcagtcagtgtaatctatctttgtgctatcatgcagtagcttctgtccttttctgtgattccgggatgtttccacctagcacaaacagcagagcctcatggtactgtagatcaaggataaggcagtaaactctcatagaaaaaaatcgttggtggccacccataccatgaactctaaggtcaatgttatgccagaataattgagctcagttatataaaaaagtacagttacattgaaatacacaatgtgaagtgacacagagatcacaaagcattcttacatacagtaacaaggagtttggagtttcctttccagcttttatcttagcattttcacacaggtattacttgatatactagcacaggctgtctctctgcaggttgtaatgaatgtctgaagtgctgttataaatagttacatgatactttattaaaactctactctggatgttagtatctaaactgtaatcagatgaaatgatatagtcctgtgagatatttaaactttaatattttgctattttaaattatgttgtgagggacttcttatgcaaatgttttataacttttctatattgaaatatcaaatatttatttatactgtatatatctcttctttttctgtatttcagattattatcagggtagatattaagaagtagaattattggctgggcgtggtggctcatgcatgtaatcccagcactttgggaggctgaggcgggcagatcatctgggttcaggagttcaaaaccagcctggccaacaaggcaaaacccgtctctactaaaaatacaaaaattagctgggcatggtggtagacgcctgtaatctcagctactcgggaggctgaggcaggagaattgcttgaacctgggtagcggaggttgcagtgaactgagatcatgccactgcactccagcctgggtgacagagcaagactctgtctcaaaaaaaaaagaagaagtggaattatttagtcaaagaatttgtgttttgaggattcctaacatgcacttccaaataattttttttaatattttttaaaaacaatgttcactgccaccagcaacacactctagagggttgagtatgtgtcttttttcatcatagagcataatttttgatgttgttgatttgttaggtgaaaaacaaaaggaggtgcttgcagttggatggagtttggagagaggactagtaatctaattactagaataacagggcctggaaagggctctgagagaactaggatctaaaggccttgcgcggagggaatgagaagaggacatggtcctgggagatgggcgtgagcagctgtctgtggagcccctcctctgtgccaggagagtgccggcttctcttctcacattgtgttctgtgatcatctcagtctttccaagtaggggagaacccagttggggaaactgaggcccaaggaatataagtaacttgccctatgttaagcccccgggacaatatgaaacctgaccataaacctgaatctgttcgagtctaaaccctattattttcccacccagaacaaaaggaagtaccatttgagaccccttccataaaagatgggcaggtggaatttggacagtcggagacatcgagggcctttcaggggcggggaaacgagatctcagtctagcataggtggagagccattgaacaagggaacactggagccaaagaagctcagctgaagtttgcatcgaatttgagaggcaatgggtagtggtgacagaagccaaggtgcgaacgttagtcctgcagccccgaatgcacactgaggcttcagctgtgctcttctcgggcagctccaaccggggcttcccaggacctgcccaccctggaggcgatgcccctgggtggggctctgctccctaaccttcctcagccccccacacatctgagttggtggggagcatgtgaaggatggagattcccaggcccaccctgcagatcctagagaatcattttgtggggctgtcccctcccaccgttacccttctgaggtcagttcattcattcattcattcagcaaagtgacctgaaccctggttgcaagcattgtgccaggagttgggaacgtacaggggaacaatagagccttttgcccactaggagctcctggtcaatttagggaaagtttattttctgaatatgcactttaaatacaataagaaagtttaaaatagaggtcaaattttcatctataggatgatgttactatctaaaccacaatcacatgaaatgatatagtccttaatgacttgaacaagattaaccaccaaaaacaaaacaaaacaaaaaacccagcactcttcattagcttcttctagcaaaattgacagaggaaactggtgtttctcaagctatgtgcctctataacactagtgtcgcatgaactcctaggcagattccttgaacaaatattaaccttcctaggatctgcaaggcgggcctgggactctccatccttaacaagctccccagcaactcagatgtgtagggggctgaggaaggttagggagcggaacccagccctgggacactgcctccagagtgggtggttcctgggaagacctggttggagagacctgaaaggaggaggggaggcagggccagcccccacccctacctgttcccctcagtgcctcctgaccctcccctactggcgagggcctctaggacccctttctctgtcactgcccttctgatttcacttggaataaagttattaataagattgctgatctctctaatttgtaagttaaaatattactaaagagaccttttattttaaaaatcaagagtttaaaatgtattctctggcctccactttctgattttccatagataatccctatatatatgccatttcaaaatacatggattattttaggaattatctgctttttaattataattcttaaaaaattggtagttcatgctgaagcatggcagttgtatagatgagaagtttagcacacagactgattgcttttcatgctgggtcgggtgtctctggaactaacaccacattcagagtttcaccaggacccccaggattcagcatataactgtacttacggctaagatttattaaggaagtccagccagatggaacaaaaggacacagcagagtctggagaaatccctgaagtcctctccccatgtgggatcccagagagcactcctcccccagcaagaaaaatgcagcaacatgtgtgtgatgtttctgcccagggaagcctgtcagagatgcagtacccagggattttgttggagctgtactggtaggcaccctctgcctagcacacagcaaaagtcgactcccagaaggaaagcaggtgttcagcataaaacatgttgcttgcacaaacagcccaggtagtgagctactcttagcagttagggatcagtgggaacgcagcccaccttgccagcaggcctttcaaaggagagcggactccagcctgccacgttgactctttactgcacacttcggattattgtttgtagctgtttttcaaatgatttccatggtggtatctcagacctattaaaagatttttttttttttttagttgagacggagtctcctctgtctcccaggttggggttcagtggcgtgatcttagctcacttcagcttccgcctcccgggttcaagcgattctccctcctcagcctcctgagtagctgggattacaggcacccaccatcatgcccagctaatttttgtaattttgtatttttgtagagacagggtttcaccatgttggccaggctggtcttggacttctgacctcaggtgatctgcccgccttggcctcctgaagtgcggggatacaggcatgagccactgcgcccgaccaaagatacgtcattaaagaagcacattccaagacacagtgtctactaaggagagacacgttctgtactgcaggtcttctcaaagcttttagtacattgacgcacatcagcagccccgtggaggatccggctcacttctttcaccctggaatatttgttcaaggaatctgcctggcagttcatgggacattggtgttgtagaggaacatagtttgagaaacaccagtttcctctgttaattttgctagaagaagctaatgaagtgctcagtggggtttttttgttgattaatcttgttcaagtcattgaggactatgtcatttcacccgattgtagtttagatagaagagtcatcttgtagatgaaaatttggcctctattttgagctttcttttttctctttttgagacacggtctcactctgtcacccaggctggagtgcagtggcgcaatctcagctcactgcaacctccacctcccaggctcaagcgattttcccacctcagcctcctgagtagctgggactacaggcacgcgccaccatgcctggctaatttattttaaattttcttagagagatatcttatttaataataaggaataatagattcatgatcagacattagaaatatattgggtttatttgtgttttcttatgtatgtgttttagttcttgttgcctgctcataatgcaacgtctttattatcattaaaaattatatcattaaaaattataagtgccgatgttattctaataatgtcagagttcaaattcataatcttgaaaaatgtttttggtcgtgtcttaacccagtgacctgatacctgtgaaagctgagggtgttttacagggcattttccatagaatttttcaaagttgtcctgacaaattaaaatgaagagttaataggatatactccactactgcaaggatttgtagcatgaaattttattattctatgcagctataaattcaaaattgatttaaatcagcaatttgatggcatatttataaagacataggaaaaaaatcttttggtattctaaagcttgcatttatccgtggtacaaatcatatctttttgtcaatttgaatttgaaagcttttatgaaatctgtttcttcttaactagctgcagaaaatccttttatcgtatatataaattggtaaattcttaacaaatcactgaatagctttctttcaatttcttgctgtattatatataatgaaagattgcagttcccatcaacacagaatgttgtcccaatttcctgaatccagattcatggagatgatcttttttaattccattactaaaatgtattagaaagtttaagtgttcggattcccacaaagcccactggacccaagtttaccaggaaatttggggaggtggggtttaatgagcttcatcatttatgaaatcatcagagctgctgataaaagaagtaaagctttgggccgggcgcggtggcttacgcctgtaatcccagcactttgagaggccgaggtgggcaagtcacctgaggtcaggagtttgagactagcctggccaacaggtgaaacccaaaccccgtctctactaaaaaaaattagctgggcgtgatggcaggcgccttaatcccagctacttgggaggcagaggcaggagaatcatttgaacatgggaggtggaggttgcagtgagctgagatcaagccattgcactcaaacctaggggacaagagcaagacttctctcaaaaaaaagaagtaaagctttgaaagcttcaagacttgtgcctgcttgtggtcatcctaaccggcttaacttgaaatacacatgagatgaaagatcaccatgcctgtaaatttcagcaaactatatgggaacatggaacatcactgtgcacttatataagtaccgtttacttcctgtcatgaataaatgtatctgtgagatgcaccactaaaaaaaaaaaaaaaaaaaaaaaaagacaatttgttaaggataaaatataaacctgccatacctgtagctatcttagaaaaattgtttccattcttaagaagttatgatgtatcacttacaatttcaaaaagagactaggcataaatatgtaaaaattttttccactattatttcagagataggagctttgttgttcatttacttactatgtgaaccattcatatttatcagggctgctgaagatttattgtcacaaattcaggaaaattaccagaagccgctggaagaattggaggtatcgaaagaagcagcaagccacgtcctttcaaagcacaacaatgaactaaaggcggctgaggcgctcgtgagggaagctgaggcaaagatgcaggaaagcaaccacctgctgctcatggtcaatgctaatctgagagaattcagtgtgagtctcacttgctctctccttctcaattagaacaggtaacaaaatactccaacgtaagcaattaaaagtgagccctggcctggctgggtggctcacgcttgtaatcccagcactttgggaggccgaggcaggcagatcacgaggtcaagagatcgagaccatcctggccaacatggtgaaaccccagtctctactaaaaatacaaaaattagctgggcgtggtggcacgcgcttgtagtcccagctactcgggaggctgaggcagcagaatcgcttgaacttgggagatggaggttgtagtgagctgagatcatgccaccgcactccagcctgacaacagaatgagactccatctcaaaaaataaaaataactttaaaataaaataaaagtgagtcccatgcactaacttctgcatgtagcattaggtaccaaaggtcagaagcagggttgcttttatgaagcacccttaaaatgccatttctgctgcaggataaaaagctgcatgttcaagaagaacaaaatctgacctcagagctcattgtccaaggaagaggattgatagatgctgctgctgcacaaacagatgctgtacaagatgctctagaggtaaattacatctgagcatggccacaatacagtttttaatgaatcttcacacatctcgtctatatgcacacatatctgttattaagtagatgtgcatatatttacaatattaatttctccatgtagcacttagaggatcaccaggataagctacttttatggtctgccaaaatcaggcaccacatagatgacctggtcatgcacatgtcccaaaggaacgcagtcgacctggtctacagagctgaggaccatgccgctgagttccagagactagcagatgttctgtacaggtaggaacacgcctttgtgggaactcaagagcttgcagtctattgatcggagaaaacaaagatggatgtttctattcacagtgatgggtcactcttcctttgtgtaaaaatgagcactcctgttttattaacctggcaagttggatttccttgtgtctgctaacatagtttaccattggcctacatatatggtggaaaaatgcgaataacaggagaagacttaaaacacataatatgctacagtataatattaatataataaaacacgtattatgctacagtatcaagccatcaaggctttattaagcacctactgaatgctcagggctttgttagattgcaggtggaacagaatgaggttattaatttctttacagatcttgcctttttggagtttattatttggttggaggatgtggctgcccactctctacctatagaagtgttgggagtctcttttccaatccctgagagataccacctccaattattttctactgcctgaaagtctgccattgtaatacaattactttaacttatattttttggatatttaaaaaatatgtactcaacttgctaaaaattcctttaaacgagaagcacaattttagccagccgtttcaaacttgtctgcacattggaatcacctggggagcttcttaagccaccgatgcctttgtcctttagctgccttccccccaaagattgtgacttaatgggtctggggtgtagggttttgtgattttttgaaaaccctcaggtgattctaatgtgctgcaaatgtgggaaccaaaagttttaggtgttatcagtgatttacataatactgtgagttaattggtaaattcctttctttaaaatttgctatgcgttatgggtgacaagtctgaccacgctgggaaaatgtatgttcttgtgcatgttctgtggaaggggaaagatgcgtgtctccttattggaaaaatgctgacataaaagattagttcacacaacaaaagcaattaaaaatcgtataagatagaatattgcataaattatgtgctaaattgagtactgcttcctaatatgtcttagggatcagtagtggaaaatggcattagataccagctcctctcttctcatcagttttcatcatttcccccaaagagaaaaaaatattctgactccatacctagctaaaacaaaacctttattacttcatatgagtaatagaaacaatttgttgtgataacacaaagttaaataattatcttttatttataaatcacagaattttgccagtccaatagtaacaaacaatagctgctaatattcggtctgggaattgcccgactcaataaccttggaaagaaaatgaagtgagttactcagcaggcaaagatgtgcccattgccagactttattttcaagacagagagcactggatgacattgtgccattaccagttaccaagttcctaagcaatgtgcccacttgttagaatgatgttaagctgattgaaatattagctgatcttcctccaaaatctctagtgaattttgtaaaattgtcatatgccatttgagggataagattcagcggcctcaggtatgcttagaaacacttcttggaggttaccaagtatgttgcaggaagcttataaccaatgcaaacatgcagtggtgccctagacatgcgcaggggattggaacagagattgaggaatgctgagggcagctggtggaaagtgatgaatggtcgtctaagggaaacagcaatagtctcttcttgggtattgattaaatagcagttctgagtgttattatgacaaagtggctacggcttctcaaagattacttttgaagttacatgggaacccataggttgttattttttatggatgatactcttctaaggggaaagaagataggaggctttcaaaactagtaggcatttatgatttttgtgagtgaattggcaagtttgatttagtttatcataacgtatctaaatatgctgctttgatagtggccttgaaaacatcagaaatgtgtccctgaatgccaccagtgcagcctatgtccattacaacatccagagcctgattgaagaatcggaggaactggccagagatgctcacaggactgtgactgagacgagcctggtaggaaacgccgtggcttctttttctgggctctgtgggagatttttctgtaccgggtttgagcagagatttagtggccccaatttctgcctattaacattcttttctggtggaatcggtttctggcttctgtcatcatatgatctgtgttttaattttttaaggtcataaatacttctttatacagactagaaaccagtgtggagatgagaacaatctcacatttccttgcgctaaaaatgatgatgctacttgatacctactggagacatttttctataaccatggtgaaaatctttattgaatggctggtttccttccttatctacttaaaaatgtctttgttttctcttgcctcagccattttaaattgtccctacctggtacctggctgactttcttgctgggaatgtgtctgggggctactctgatggagtcacttcctctgtccccagcaggactccaccctgccctgctctcaccatgcttaagtggttctgttttccagctctcagaatcccttgtttctaatgggaaagcggccgtgcagcgcagctccagatttctaaaagaaggcaacaacctcagcaggaagcttccaggtcagtatgtggctcggacggtgtagacaggcagagtgagcgtgagcgtctcgctgagcagcctctaagaatgttctccttgcatgcagcaacttgaagcttagcatttctgtgtcccatttatattccaatttcctatcatataaattttcctatcgtataaacttcctatcatataaacctcatagaatttggcatttttattctagtgatatctgttcctttattgtgcagtcatctctatctttaacctgtccttaatcctccactcattgccttagcttggagccttcactgttcttcctagtgtctgctgggttatctttgattgcgtgtgctcctctagtttttccttgaggagatgtattatgcttgatatttcttttacctttctcatgggactaatatcatgttagactcatagtaggttctcgtttaatgattattaaattaaatcctaattgatttagccatttttcaaaaaatacctacgcagtttagtttgtgctaaagtttcaacaaagaatgacttggcatatgtaagagcaatccatccaataaacatgaaccaaagtggtagcaggaatctgttatgtaagagaaactatgtaggcctacaattttttataacaaataatgtgctttccaccttaatatattctaatagatcaaaaataccaagatttctggaggagtaaatagtgggccaggcacacagctcataccctttacaggtgacttacttccgagtctaacactggatccttccacagctgtctgaactaaaggcttggatatgtacatagttttttttctcattgagtgacacagtttaaaatttatgttgtcatctcacagtatcgaaaatgcataatgtgttgatgggctgtaatttcagtctgtacaactagaggtacttcataggtagtgaaattgggagcttgctggcaattaaaatttcacgttttaaccatgtgctcaaaatccaaatgtgattgtatgttatgaacagaaattttaaaagtaaaagctgtgatcaaacttgagaaggaggttgagttgagttccagttgggtggccagaagggaatagtaggggatggaggattggccagagatgcaggtgggagactgtgaggaagacttccaggtaggagcccaccctaggggttttacaacccagaggagaaaggtggccaggattcagatgggaatagaaagttagtgtgtctgattaacactgagtgacttaaacacagctcttcatccttgagctctagtaaaattggacatgaaatttaagtagaaatattagtgaacaagtcaacaagcaaagtagagaaaatgatcgagcaagctagaaacacattcttaatttcttttttttttttttttttttttttttttgagatggagtcttgctccgtcacccaggctggagtgcagtggcacgatctcagctcactgcaagttccacctcccgggttcacgccattctcccgcctcagcctcccaagtaactgggactacaggcgcccaccaccacgtctggctaatgtttatttttatttttatttttatttttagtagagacggggtttcactgtgttagccaggctggtctcaatctcctgaccttgtgatctgcctgcctcggcctcccaaagtgctgggattacaggcgtgagccatcgctcctggcccatactcttaatttctataatgagtggtgctcagtcttgctggaaaaactgtcaatattgggaatctctttagaaagctatgaattctgtcgatggtcaagaatgataaagctgttgcctaggcaacttttttgcaggctaacctgaaaggaaacatttttctccctttaaataggtattgcattggaactgagtgaattgagaaataagacaaacagatttcaagagaatgctgttgaaattaccaggcaaaccaatgaatcactcttgatacttagagcaattcctgaaggtaagtggaaaggactttcttctgtaaataacgtcttctcattgtaaaagcatcactcaggagcataaggaagtcctgcctcaagactgatcagggctttagctcaaaaatgagactaagattggcaaaatttttacttgcaaaggaatatgatttagaaatgaaaatcattggtttttaaaataacatcacaatacttgcctcaagctactagaattatagtcttaaaaacagagactgcatagtatctgaattgcttacttttgaaatgggcttgacacattgcttagaggaagaaagaccattgaaagaagtcagcaagtaaagaagctggaatgtgctttacctgcctaaggggaaaatgccagattcattatcagtgtggcaaactgaagactgcttgcttggccatcttcctcagtgaggcagtaaaacattaggctcactgatcactttaatactgatggtttagaaatgtggtattcatgaaatttttgggggggtctacagtaattttattgtaacagagaagccaggccgcaataagtctacatgatcagagcagatggtggttctgtccagtgggtgaagcctgaacccggctagcagcacacattttttgagacggagtctcgctctgtcgcccaggctggagtgcagtggcgcgatcttggctcactgcaagctctgccccccgggttcacaccattctcctgcctctgcctcccgagtagctgggactacaggcacctgccaccgcgcccggctaattttttgtatttttagtagagatggagtttcaccacgttagccaggatggtctcgatctcctgacctcgtgatccgcctgccttggcctcccaaagtgttgggattacaggcgtgagccaccgcgcctggcctaaagttttaaataggataatttttttatgtgtaatacaaatgaattgtgctgcacctcaaacttctcttttgttcttttgttgttttttactttgaaaatttcaattgttttatagagaccacgtcttgctgtgttgcccagattggccttgaactcttggcctcaagcgaccctcttgccttggtctcccaaagttctgggattacaagtgtgagccactgtgcctgtcctcctttttttcttaataagcatcttttgaaaaagtcttataaactgctttaaagccattaaaaacaggaagccccgaagtcctgtttgtaagcatggaagttacctggggaaactgggcatgctgcgttgggcttacttcttaccttgaaacaatggagcattttctgatctggaagatttttttttttccttttctttttttataaggatgccatggtatattttgactaaatgcttaataacatttttatttgaaaataatttcgagcctacagaaaagttgcaggaaaagtaaaaaggccacctgtataccctttttccagctttttctgctgtaaatgttttgccccgcttgtgattaaatgctttgaaaatgaatgatactgtcttttaaaaatcctcacccagattttctagaataactgaattccaatttaccttgagtggctgtttgggctttattctgctgttacttctagcagccagttgatgctatgggcaaatacctcttcctttaacttaagacattcccaccttagctgcagacctaggatccaaatccttattatccagacatgaaaggaggtggagaacatgtttcatgaagctgagaagggagtgatggaaaaggacccaaataaagaagttcagcttattaacatgtaagacacagctcacacagcgattggccattacttttgtgatctcattgtgtattgaaatcatattccagagaagtattaacaaaaattatttcatttgtccctaaaaggggatagtagagcatatgatatgcagctttaatattgccattagaaacaagaagctcttagttcattgaccactgcccaaaagaaaaaaaagcaaacagacaagcctcagtttgtgttcagcatcagtaatatgacaataatatatttctgtgcgaaattacatttgttgtcgttttattcttttctctgtgtgtaagcaccagaagtgcatgcttttatatacatttattttaggtataagagacaagggagccaaaaccaaagagctggccacgtctgcaagccagagcgcggtgagcacgctgagggacgtggcggggctgagccaggagctgctgaacacatctgccagcctgtccagggtcaacaccacattacgagagacacaccagcttctgcaggactccaccatggccagtatgtcagcgcccttccttccagtcatgatcgtctgcgtcatgcagacgtggagctagctaagcacacagtggtgcgttgttcacaacattcctgaaaagtagaagtatgctaacatctggattagcctttattaagagaaggaccttgggaaatgcatgctacttgtgcagttttcatctttgtaccacaatgtcatggctttgattgttagggtgttgttttaccgagtgcattgttaatggacaattaattatcttgtttttccctctccccaactttcttgccaccccttgccttcttgtatttgttagctctgttggctggaagaaaagtcaaagacgtggaaactcaagccaaccttttgtttgatcggttgaagcctttgaagatgttagaggagaatctgagcagaaacctatcagaaattaaactgttgatcagccaggcccgcaaacaagcagcttctgtgagtttggggccccgtggctttcgtaactgggctctcagtcatgtggggtcccagggaattcatgcagacatggccgtcagtcacactgcgccccttaggacttccaaagacccagatcccaataatctgggcttcctcatagccctgtcttggtatgtttaaagccaataactagctcattttctttgagttctgcttttgttcagcatgcttcaaaatgttgttagcaaagagatttccatgtctttatggagatttatcattatagactaaatttaaaactattagcctggacagtgcggaacatgtcaaatctacgtgttaacatcactcttaagtttatgggttgcatgtggtgttagttcttcgttttaccaacttagttttaataatccaagtattccttaaaatgtttgtgtagtatgggcctcatccttgaggtgtctgagaaaacagtttgtatgcaacgaaggctgcacaaatccaggtcactaaatgcctgaggcactggacacctggagcagttcacacgtgagaagatgttttacccatggcacatggcactggctgtgccctaagggaaaaagtttccttttgagagaatgtgcagtcgtcatgtgattggggacttcgagaggatgaatgcagcctctgggcttgcatttgtccacctgaggctttctagggaagagaaaggagcacagggctctgtcttttccaaaacctcaagtgtccttgctactggaaaaggaatgttggtttccatgagctctggcttgcatctgtttcagttacaattgctaaataaatacaggctgggcatggtagctcacacccgtaactcccacaatttgggaggttgaggtgggaggattgcttgaggccgggagtttgagatgagcctaggaaacataataagatcctgtctctactaaaaaaaataataacaataaccaggcttggtggtgtgaacctgtagtcccagctactcaggaggctgaggcaggaggattgctcaaggagttcaaggctgcagtgagctatgatcacgccactgcactccagcctgggcaacagagcaagaccctaaataaataataaataaataaatgtaagcccaaggaatgcttcttgatgctaggttaataccaaacttagactctttaatgtaagatatatatgcaacgaattactagtcaaagaaatatgtagtaagtgcaataattgctctataaatatctgctgagtgaataaatatattacctctccatttattcaatagatgattatcaaataccctctttgtgtcaggcggaaagattccaaggtgataagatccttgtctttaaggaattaaatcttatatgagcaagacagtttcctatataaaataacttattaaaaactaacactgattttctcatatttaaacacttaatgaaatcatttttgttaccatctgatatgtcacttcatgaaacatgaaccattgtgtattatcaagagaggaaacctgcctcagtgaaaattcattacagaatagcattgttgagctgctggtgagctgccggtgtgtgtcactaaatgatggggacactttcgttttccttctacagattaaagtcgccgtgtctgcagacagagattgcatccgggcctaccagcctcagatttcctctaccaactacaataccttaacactaaatgttaagacacaggaacccgataatcttctcttctacctcggtagcagcaccgctgtaagttatggacctttggaaagcgacactgaatcctttatgcacttctagatttttctgaattttcacttatttggcaaaaaaaaaaaataggccttagtgaagtctctaaatctcccatagggactaacctttgttaaaatggtagcattagatgaaaaatgaacaaactaccaaatggaatgcctgtgagaaggaaagtgacgtttctgaaggatgccatcttaattgcaagccttggggatggaacttttttgtgattcccccattgacccctggagtgactgagtatcagaatgtcaagcttctgtcaggtttttcttgccaaggattccagtggtctccagatggcaagtgcctatgaaaggtcttcgataccttggctgtgccagtgagaacaggtcagaagcctggggtgtgtagggcagaaaatgttaacgggcacatatagtatctgaaatgtcttcaggagatgagatgcaaagcgcatgcaagtctgtgacgggggtgggacctcatggctcctgtcttactgcatatttcacatccatttcttacctcggagactgggcaaatgagcaagctcagtgccttccctggtgctccctgtggactgcctgtgacctgcagcgaattttcctggggactctgtgggagacattgaggagggccatgccaggcacgcagggaggcgctaatgtccccggggctgtgagtcatgccccagctccagggaagggaccatttcaaacaaaagaaaatagatttggggggtttgctttttatgtatttatttttaagaaaagagaaaaccccgtaagaattgactctgtaaagtgttgtggtggtcagcaaacagtccagtgtgtaaactgatccccgttcattcctcgccccccagtctgatttccttgcagtggagatgcggcgagggaaagtggccttcctgtgggacctgggctccgggtccacacgcttggagtttccagactttcccattgatgacaacagatggcacagtatccatgtaaccaggtagaagagaatgttctctcaaagcagctctcttttttaaagtgtgtctcataagtaattacatgcttgtaacatcatataataggctttgaaacttctggaaagtcagattataaccaaacaatacttggtttaggttagctgtagaaataagcatttgtggccagtggctcacacctgtaatcccagcactttcggaggccaaggcaggcggatcacctgaggtcaggagttcgagaccagcctggtgaaaccccatctctactaaaaatacaaaaattagctgggcgtggtggtgggtgcctggaatcccagctactcaagagactgaggcaggagaattgcttgaacccaggaggtggaggttgcagtgagtggaggtcgtaccactgcactccagcctgggcaacagagcgagactcccatctcaaaaaaaaaaaaaaaaaaagaaaagaaataagcatttgttacgagtgacagaacttcttttttaaggctgaataatagtattccattgtgtatttgtgtataaaaccacattttctttatccattcacacattgatggttaatcattccacatcatatccaaaaatcataacaacattttgcacctcagaagtatatacaactataatttgacaatatataataaaaattaattcaaaaaaattttttaaaaaacttaaggtttggatttttttcttactgcaggagaaacaaactttgataccaaaatcaacaatcagaagaagaaaaaactgaaaagcttaggttacctttagaatgtctaaaatgtctaaaagtttaggttacctttggagaccaggcatggtggctcactcctgtaatcccagtgctttgggaggccgaggtgggaggattgtttgagcaagaaggagtttgaggttagcctgggcaacatagtgagactctgtctctaaaaaaaagttaaaaatttatccaagcacagtggtgtgtgcctgtagtcctagccactcgggaggttcaggcagggaatcactggagcacaggaggtcaaggctgcagtgagcaatgatcacaccactgcgttccagtctgggcgacagagcaagaccctgcctctaataaagttaaaaagtaaagaatgttacttttagaaagtctacgtgtaaggcagccaacctggtaaaattcctcaggagagaggtgtaaggtgtggcatggtagacattgcatgtggctggcagcacaatgcacatagacaaggacagaaaataaggatgcaagtgggggatgcattttcttaaaattcaggcacaaagcaaaattcttccttttaaaatccttctccagaggtaatcacttttgagcagctttaagtatatgttttcacttttctgtaatattatggtttgttgggatttttttatttacaaaatgggataatatttatggagtagacatatcttcagatacagtttagctcatctcaaatgttttaagcagggacacaacatgatgaaatttctgtttcggaagagataactcttgaagatttcgggcaataggcaagactggaagccaggaggccagcagggggtgctgttgcagggcgcttggggagaagcagatggtgggtgtgaaggaaacgggattgtatgtgcgctgactggaaattctgaaaatttcttttgcaattctttgtaacccttagatttggaaacattggttcactgagtgtaaaggaaatgagctcaaatcaaaagtcaccaacaaaaacaagtaaatcccctgggacagctaatgttctggatgtaaacaattcaacactcatgtttgttggaggtcttggaggacaaatcaaggtaacattatgaaagttcttctgaacaggactgattgactgattttacctatatataaaagtcatgggccgggcgtggtggctcacgcctgtaatcccagaactttgggaggccaaggtgggcagatcacctgaggtccggagttcaagaccggcctgaccaacatggagaaactcttgtctctactaaaaatacaaaattagccgggtgtggtggcgcatgcctgtaatcccagctactcaggaggctgaggcaggagaatcacttgaaccctgggaggtggaggttgcagtgagctgagatcgcgccgttgcactccagcctgggcaacaggagcaaaactccatctcaaaaaaattaaaaaaaaaagtatatgtttagatggttgaatatatcctaagcagatgaagatgtttctgcttttgttttgctttctgacagttcctctgcagagttaggctggttttgtacagtaaagggtgatgcttcatcagtagcataaatggagaaaaagccaatggctcatcttgctgttcgggtttctttcccagtgatgaacaggaaattcagtgctccttgttaatttctgtaaagtttctttatctctagtctagctctagttagtggtcaattaatactaattagtgtttagcaaaaaagcccaccatatttattttattgtatcagttctcctctcaccaaatataattgtgttttttggacctggttcaatgttctcaagtgggagtctaggtctcaggtccagctgggccctcactaccaatcacattctctggctctctgttttctcactcgtacaacacgattttctccatcaaccctagtcactgagatgatctttaagatcctgcccagttgttactcattctaggattccacttcataactggaaggaaatccagtgattacaaactggccttttttctaatgttgctctctcaaaatttggatctgttagattgaagctcccagagagaagttttgtgcacgtggagaatgtattttgcttggtcagcttatatattggttatgtttgtttgcttgtttgcattagaaatctcctgctgtgaaggttactcattttaaaggctgcttgggagaggccttcctgaatggaaaatccataggcctatggaactatattgaaagggaaggcaagtgccgtgggtgctttggaaggtaagatgtcgtcatggtttagcacatagtatgtcattctgttaacatctgagaagtgctgaaagaatgtattaatacatgcatgtcaaggaatagagtttgtgatgtcgctggtaggtgtttagctgccacttacaaagccatgctttttcatacgtttattgtcaaaaaaaaatcctgcgacattggtataatgtagattataccaatctacattatattattatattatattgtcagatgatataatgtagattagttactgagagaagcatgggtatcatttttaaccccttaaaaagaagtgctctttttcctatgtcttgtatgctttgatcatggatcataaaccctaaaagtttcagacaatttctcaaacaaccttctgtctcagagagccacaaacaaatctttataaatcactgtacatttttattttgaaaatatctccaaggataagaattttttcacgtgtgtcagtttttacagctaagtactttccaattccgaaccaagttctataattccagaaataaaatgcattaggaaatagagaaaaatgagtatgtttctgcatatattgatataaaggcattcaatgacttaaccttaccaagtgcaacatctttccccccaacccattattttataacaaaataactgcaactccttaagtatataaaacctgttttccatcactttagtaattgagacataaattgcttttttccattagagaaatgtaacatctgatataatttctcttgtctaatgggctgctctgtccagatggatatctgcaattatccagtgacaagatcagttaaagcaactcacagcacatttagaaactcacgggtgaatttttcattttgtcattgtcaggtctgtagtttaagccttctcttttcccctcccttcgcttgtttaaaaagttaggaccaggcgggcatggtggctcatgcctgtaatcccagcactttgggaggccgaggcgggtggatcacctgaggttaggagttcgataccagcctgatcaatatggtgaaactccgtctctattaaaaatacaaaaattatctgggcatggtggcacatgcatgtagtcccagctactcaggaggctgagacaggagaattgcttgaacccgggaggcagagccaagatcatgccactgcactccagcatgggtgacagagcgagactccatctcaaaaaaaaaaaaaaaaaagttaggaccagaggtttggtgattgtagccttaagactgaaaaagaatatagggtttggagtcttgagtttctcaggcttctggcccaggtcccccaccaaaattttcttccctgactttggataataagtctcttcacctcactgaggtttggtttctttttccagaaaagaaaaatgatcatcgttcttgtcttacccacctctataaatcatagtaatgaacacacaacatgatgcgtgtgaaaatgctttataaactgaaaacactttaccagtcttcaccactggtcccctacagtgatgtggctttgctttgtagataaatgtcacaggattttttttttttttgacaataaacgtgtgaaaaagcatggctttgtatgtggaagctatgataaaaaatgctgttgcctcgtgaggtaatgacacaccctgctctggaacttcagtggaatgagcaccttaattcaggctctctgatccgccactttttccttattctgtgtttccagcaaggaactcttccagcaatttagtaattctaacatgaaaaacaccctgacccctagactcttatcccctctactgaccccagatcattaacctcactgttagaaagaaaaatggttaacagaaattaaacatttctagtatgaaaaagtccccctactttacctgtgacaatatcctctattttcatcagtcatttccagaggtattttgaaatcattgacgtcaagctacagcactgaatgaattgaatgatttccggctcttctttttctgttggaatgaggaagtcagctttttaggtggtcacatgttttgttccccttgaaatacctggcctgcctccggatttccacacaccctggacctttgggtcaaagatgctgccctcctgccaactcgagactggctttttgacggagggctggccacccagctgagtagtagaaccacgttgactcatcagctcaaccaaactagggtctgattaaatatgtttttctggggactgaacaaatccactgttatattggccaacatttccaaaaatacatgtttgtaaagaatactagtttggtgtagggtattaatacgtattgtgtactgaccataaatgtttgggaaacactgagttaaataagcatgtttcttggctgcgaggccatcggagcctttaattagcattaatatgctgacatgcatggtaaccctgtcctggggagaggctagagttgcagcatttcccaaactcacttgagcttgaaccctttctgaaaaggtacctctgggtgaggctcacgcctgtaatcccagcactttgggaggccaaggcaggtggattgaaaaagattagccaggcatggtggcgtgcgcctgtagtcccagctactccggaggctgaggtaggaggagcacttgagcccctgcacttctgcctgggtgacagagtgagatcctgtctcaaaaaaaaaaagagtgcatctggagttgcatctgcttcgtaaaacatattttgtgaagtgctgatataggcacagactggcactttacgtctgtttgtaaattgattgaaccgtcttcattttaggtaacatcccccactgcaccccttctcctgttagacaagaactttagttcaaagagttaataccctaattctagtaacaatccattttagcagacttagattataattccttgtcctttctgtgtataatttgccattattaaatcattagtgtagcccatcgatgtcctctaaatttttaaaaaatttttgactgtttactcttaaatgtgatttatattaccaagtaaatgaattgaaacttttttattcctccttgaatatattattacacttgtacatggtgtcactctgtaattatgagcagtctgttatattctcaaaggatgctacagaattaaccactgattctaacagtcctcatcaaaatcaatatggaaagaccctttatttaattaacaggcacaatccttgtattatttacgagtggacattgtgagagagtgctggctacgtggctggcctttgacacgagtaagtcacctgcgttccaggccctctgctaggtactggccatgtccacatacatcacacgtttatgtcctcagacatctcatggcgtaggggaaaatgcctgtatagaaagcagaaaatgcatgggctgtggcaaggggccagagttggagaagcagcatcccaagcccgggccagggttatctcacgccctcgcatgacggcagcagggcatgctagtaggtcagctccggattatccacatctcatgagggagccctcggagaatcagggaggtctggtgattcttccagactcacggggctgagcgctggggagggcggacgctctcctaattccaggctcccacttgaacctgcgggtgatggtggcatttccaaggctggaacagagctgtccacaaagtgctgtgatgaactgagctttcatttgtcctgggcccttaccaaggcagggacccacttggggaacaggcacctgggccgactgttgaggtacatgtgcctctggtcatagtctggaaactggcaggggctctgggagaagttcagggaagtgactgacatggggacaagccttcggtcatgttcagtcatcatttcatttgaggtccccctcttcgtggccacctcactccagcaggccctgttgagggagagaacccagtagcagagcccccgcgttcttgagagaggagggctcacaggctctgggaagggagaaagcccccatgtttttgggagaggagggctcacgggctctggagagggaagggccatgcactgaggaccaagacaaatttctggagttttgtttgaaacctggctttgtgatttcttggggtgtgtccttgaacaaggtactttaatctttgaggctcagcttttcataggcagaaatgaggaccggcccatcgaggacctccgaacactgcagaataatgagagaaaacatctgttgtatgccaggcactgttctaagaactgcctggggcagccctcccagagaggttttatggtcatccctgttttatagctgaaggaaggggcacacagagaggttaggtgagttttccaagttcacacagctagtatgttggggacctgggatttgaaccctggtagtctagctctagagtctctatcctccggcacatgcactgtggttggccaagaggtagaacaatggaacatatggctaggaagccacaggcttaagaattaaagaattaaaccatagttgaagaatttatctagagtgcatttcttttaagttataattcctcaaagagaccacatgatggaaatttttgaaaaagcaagagtgcaggtagttatacatttgaaacctcaggtttcacaaagcactattttttgttttgttttcttttatcatccatggaaacgattttactgtttggttagactgccttgcttggaaatgtggcactgagtttggttcttacacctctaactgggaacagttcaaattcttacccaaaaactatcctcatccaagtttcactctcaagccttatgatattccagaaaattatttttggaacataattatggtctgttccagatgaatggctttgcgattgaatagtgagtcaagtcagccttttgctctgttgggggagaagaccagaaaacacactcacctgaaaatgccctgggccgtattatatcccttttgtaacctacgtactcatctctaagtatgatatgggtctttaagctcatcctgcagatttttgaggatgtcagtgatgattgttttgtgaagtgatgcttctggtatatgggcacatacttgctttccatcataactccagtttccctaaggtattagttaaaacctcatcagcaaagtgaaaatgtcaatataaaaattattctgaaggcaccagagttaaaagaggacagttatattaaaggagattagaacaaataaatccagttgataaactgaaatatttatagcagttatcctcctgtaaagaaatgtatttttaccacaatgaatactgcctgcattaacattattttctttataaagcagctgggcatttgtcttgcatcttcacatggcaagcatatttttaaatattatcatctacacttgttatgaaagtatggaactaatagctctacagtgatctttgtgaaggagaactcagtaagtgtgttcttggttctttctaccctcctgagaatggattctatttcatctcttctgctttgcagctcccagaatgaagacccttccttccattttgacgggagtgggtactctgtcgtggagaagtcacttccggctaccgtgacccagataatcatgctttttaataccttttcacctaatggacttcttctctacctgggttcatacggcacagtaagagtgtttatggggccctaggccctactgtatacgcacatttagattgctatgtggttgtttatgtttaatgaggatttactaattaaatatgtacatatgtataccatacaatttttatgagcatatactagtattaatatatgtgtgtgctaaacaatttcctcattttaaattatttattatcattgtagaacctttagaaaaatatagaagaacaccaagtagaaactagccttctagtctttatagatatcaattcaacatttgttattaaatttcgagctcaaataatatgtcttgttctgggttcactgtgaccaccgtgacattgtttgaattccatccatgggaatttcatgttcttgtttgcatctcatgggctggtgatttctgtctttcagtcttttggttttattttttagaacgggccccttgtcagtctcaatgaaaaagatacgaggagattccatttctcttactgaattgtggattttggtaacaacagatgacatttcatttatattagtgtagtgttctagaaagccttcgtgggcatttttggtttcgtagccgatagacctctggctgtggggccagatccagttttctcagtttgactttagaaggtttcagccatccctgacttgaagggaaagggaaacctgggataaagctataacctggggaactgtgttctcttttttacagaaagactttttatccatcgagctgtttcgtggcagagtgaaggttatgactgacctgggttcaggacccattacccttttgacagacagacgttataacaatggaacctggtacaaaattgccttccagcgaaaccggaagcaaggtagggacacagatggactcaccagatgtcggtcaccctcataagaatagaaatcttttcaaaatcagcattcttttttccacagtagtttcctgggtattgaatgatagtctacttgaaagccagtgttgtctttggaatactaaccaacaggattcacattttgctggaggagtgttatacttgtatttgcctgtgatttccaagtgtgttatttaacagtaaatgctggattggaatcaagaatcaaatccattctgttttcttccacatgcatactgctcttatttagcaatgtgtattgactttgatagagaggattttcacttgtccttcaatagccaagaacattagctgatcaaattcgcagaatctaaaagaatatgcatttgtaaatgagctttgttgccagaagtttgcattttaccttaacatggaaagagattttccttttcttatctcttgcctgtgctctccttttaggagtgctagcagttatcgatgcctataacaccagtaataaagaaaccaagcagggcgagactccgggagcatcttctgacctcaaccgcctagacaaggacccaatttatgtgggtggattaccaaggtcaagagttgtaaggtatattaaactgcagaattttcatgtccctgatttccaactgtattagcttgctagggctgagaatggactgtatcacaaaccaggtggcttaaacaacaataatttattctttcccagttctagaggctgcaagtccaaaagcaaggtgttggcagggcttgcttccttttgagggctgtgagagagaatctgttccatgctcctagcttctggtcgcctcagggattccttggcctgggtcctgtgtccacatttcccctttttataaggacaactgtcatgttgcttaaggacttcccctaatgacctcatcctaactcgattacctctgcaaagaccttttccaaatgaaggccacattcacacataaggaggatcaagactaccacatcttttgggaggacacggttcaacctgtaacatctgcttctatttattcaaagtactctatgccatgtgatttgagaagtaaagcaggccttctgcagaaaaattagtgattttatatgtattgcctttagaacatctaaatcctgttaccgtgcaatatttggagaccctacttgctgtcatacttcatctccctctctagacattttagagaagtagatctcctttaaggcaaaaggaaaaaaaaaaaaaaagaaatcatgctttctgcagacttttctggattctcctttgtgtggttagactgaataatgtatgtgcaagttgaaagaccagcatcaagaagtggaatgaaatggcacaggacacacaatggaatccttgtgtaagactgattcatgttgagctttgtgactttaatgatttacagaaactttgtgtggctggttcattgtcctcagttttgtaattttggttgtaattaaactctaaggttctttcacaccattcaaaaaagacatttatgaaagtccaatagtcaaggtaagacagcttgcagggagcggggtcattaaatgtccaaactgggccattcagcatagtggttagcaaatgtccatttgtagcagcgctctatctttaggtcaggttctttcatagaatcctcttatatggcacagagctgcagccattcagttgccatgatgagcagccttttgtagagagaaccacttctccactgtgccctttctctttgccaggtatcttagaaagtcccaaggaacacagtttgcaaccatagccgcctccggatcttagaatcgaatccatttaaacctcaggggagttggtcacttgctaagtcttacctccctgccaagacggagccaggactagaagctgtctccagatcccatcccagattcattccctgtcatgctgggaccaggactggggtgttcctgtagcctcggctatgtcctagtacatctggactttgcccagacggcccagtgtagacaacgcaggaaaggacagaagcccatatcacagatgttctcagtagaagggacttaggtgtcatcaaagccagcctcctcgtttacatggaaagaaattgagatctagaaaggttgaaatttgtccaaaatcatatagttgcttaatggtccatagctcattgttcaagatgagaaaaaaaaaatgaggtgtgactgtaacaggaaaccatgttattgcaaagctctcctgtgaagagctggtacagaagagtacagctgggagatgttcagtggtctccatattttggaaattagagctggactacattgtagcctgacctcagccaggagtgtggagacttctggtaagaaaaatatgatattgacttgaacattgagaagtagagtttcggataatcccagagttcaccaaatacagttacttcctttaggacaaagttcatggatatgcaacgtaaacaacagacaatgacttccttttttagcagtcagatcctgggaaatagcattacctgcacttgtccccatgggaagcaaacattctactctacatggagactggattataatctatgtgctgcaatgcactgtgcactgtctttcttataattggcctgtgttttctgtaggtagccatccaagtagccaaactcactaagtttgatccctttctctagtcctaaggagagtaagagagtatttgtttgacctgaagttctctctatcaatattgctcttagagggaggccaagacatttctgcagagtaacacatggaaacaggtattccagaagtatagggtttacccccctccccggcttttcttgctttggggggcaggatcttgctctgtcacccaggctggagtgcagtggaacaatcatggctcaatgcagcctcaaactcctgggctcaagcaatcctcctgcctcagtctctgggactacaagtgcatgctaccatccctggctaattttttattttttgtagagacagggtctcactatgttgccctggcttgtctcaaactcgtgggcttaggtaatccttctacctcagccttccaaagtgctgggattacaggcataagccactgtgccttgcccagtggctttgtattccttctttcaaaaatggaatttaaaaacccaaattttgtggttgttctcatgcccttccctacaggagaggtgtcaccaccaaaagctttgtgggctgcatcaagaacctggaaatatccagatcaacctttgacttactcagaaattcctatggagtgagaaaaggctgtttactggaggtaggaaacattgttattaatgttcaaatgagtttccataagtgtccattgatttatcaacatcataacacaacaaaccagtggggatagaaaagagatgatggggaaatcagcagtgtcctccccatggaaggtttggccacagctaggaactcaccatgctgtttcatctcctctgtgtccagcccatccggagtgttagcttcttgaaaggcggctacattgaattgccacccaaatctttgtcaccagaatcagaatggctggtaacatttgccaccacgaacagcagtggcatcatcctggctgccctcggcggggaggtggagaagcggggtgatcgtgaggaagcacacgtggtgagtagggccggtgctcctgagccccaagctcaggaaatgacttcgggaaacaatgaatggaaaatgactgactcataaacatttattgtcgctgtgttcctggttgtttatggatgtgcattttcaataagtaaaagttattgttgctgaatgtcatcccattatgaatcaatgatttctcatattgcataatccatcttcattgtctggtaactgaggaaaaagttatttgctgtctacctctaattttttaaaaactcattcagatagcatatacggagttttcttccccatgttgtggtcatttctcttcattccaaggccaacagcagtccttaaatcctgttgaggtcttcagtctactgctggatgaagcaagactttctttatctattataggattgaaaggagcagcaagggaaatgtgggctgtgataagcacagtaaactaacagagagaggagagaaatgatgaccattttccttatttatgttccttttcaagagcgtaggtgatatttccccatcctctgctcaaatttgtgtctatcacataatttgaagagactttacagaatgttagcacactgtcttaatcaagttgagtccatgcagccaaaatctatagaatgccaccttgtactctgcagggtactttacagacattgctgtgtaattatcacaaccatgctgcaaggggaatgctgcttcctaccttttgctgaggaagaaatgtgctgagagagcctggtaaacctgaccaaggtcacaccactggtatgagtcacagtcaggactggaacacaagtttgcagaacccaaacatgtcacaacatacttggggaagggctgacagtgactacgactggttaatgagttccactgaccttttttttttttttttttttagttgaactgaaattcatataacctaaaatcgaccatttcatagtgaacaattcagcagcatttagtgcattcacaatgttacgaggccaccttttccatctagttgcaaacattttcatcactcaaaagcctatgccattaattagtcactcctcattctcctctctccccacccctggcaaccaccaatttgctttccggctgtatagttggatttactattctggatattttgtacaaatggaatcatatgatgatgtcttgcatctttcacttagcatgtctttgaagttcatccccattggagcatggatcagtacttcattcctttttatggctgagtaatattccactgtatatacataccacagtttgttcatcagttacttcatggatgaactttggggcatttctgccttttagctattatgaataaatgctgctatgaacatatgtggataagtatttgtttgagtccctgtcttcagttcttctgggtgtatacttaggagtggaatcactggttatatgataattctatgtttaactttttgaggaactgccaaacttcttctccattagtcttagtaaggttactttcaaatcaaagtgtgcttactaagtcagcaaaaaggaatgatattagccattgctagcaagggtattgtgagatactcacattccaatccttctagtgtataaactacctcttttcaatgtgtcaaaaaaaattaaaagctttaaacattttcacatccttcaaatgtttaattctacttttcataatgttggaaacaacatcacaggcaaaacaattaaatattcatatgtatgataataaaaagttggaaactactttaaatttcattgataaaaagacaaattacaatatatctacttattggtatctaatgtagcaataaacaataaatatgaggcaatgcagaatggaaatgtttgaagtcttcagcaataatagcataatgcagaatataaattatatgaacagagattagaaagtaacatacaaaatttaacattgtgacagctgaagagattcttaaggaattgctctactcatttgatgttaatcttctcacattatcttcataagatgaaagttttctaaatcatatagtaatgtgttttgtctgggaaattctctatgcaacctccccagcccttcttttccatcatgctgatcggaggcaacattgaggtacatgtcaatcctggggatgggacaggcctgagaaaagctctcctgcacgctcccacgggtacctgcggtgatggacaagcgcattccatctccttggtcaggaatcggaggtacttgtacgcggccaggcagtgtgtaatgaaggtgtggtgagctcagagggaatgtgggaggaaccttgcggtggtgccctgggcggctagataactggggtcatcggcatccaaataattctagaaccttgctaggattctttcctgggaaccagtttcatctgctttgtaataagatacttgtagaatttttataattaaacaactttagctctgccctttactggggcccagcataaattgtctttacattggattgattctgtggcaaatagtactacactattagtaaataatgttatatcaatagtaaatagcattatatcaacattcctgtatatttccctccaaaatgtagactgaatgctttaaaagcacactgggcattttcatcataggtaaagaggttaaaaaaaaaagaaaaagaaaatctctccaaaaggcaatctcattcaatggatatttaataacattccattcgtttctgaaaaatcttcagttgtgagttttaattttcaagattcacctttttggtcacagacagtgtcttgttaaaatgaacctttagggaacttttattattcagtgagaacttgtgggaattatggactaaaatggaattattatttcattacgtttaaagcttttcatttattttctccattggtcttttagaatgatcactgtccaattggatgagaacaatcctgtggaaatgaagttgggcgcgttagtagaaagcaggacgataaatgtgtccaatctgtatgtcgggggaattccagagggagaggggacgtcgctgctcacaatgagaagatcgttccatggctgtatcaaaaacctgatcttcaatttggagtaagtgtacctgctctctgcatgttcttgcactttctgacctttcatggtgagtgctaacactaatctgaaatctcattgtactgtttgagattgaaaactttgcaaattcccaaataatgagtgaaccccattgttctatcatgtaagtctccccagatggattttattggattagaatgttagacagatctggtcatcatactttaaaaaccatcgctgaacattagctctctgtgactgtccataaaaagccgggattttaatatatttttgacatgcatttgaaggaacatagggattttgtgatgtaagtctcttgctgtcctgagagcattgctttgaaggagctgtttactacggggctactagcagcttcaggttatcaatggcttccccaaaaacaattactgtataattaagaaccggaagcctttgggggtctaaggtgggcagatcatgaggtcaggagtttgagaccagcctagccaacatagtgaaaccccgtctctactaaaaatacaaaaaattagccgggcgtggtggtgggcacctgtaatcccagctactccggaggctgaggcaggagaatcacttgaacccgggaggtggagctgcagtgagctgagattgcaccattgcactccagcctgggcgacagagtgatactctgtctcaaaaaaaaaaaaaaaaaaaaaaaagaactggaagcctccattccctgtgtggagctcatgaggaggaaaagaactgacatgtgcccatgagcagttcattcctccttgctcaccctctgcctctggacagggtgctgatgggacacaagctgtgctctgctctgtgggaccagcatctgcccaggagaacctggaagtgccctgggcatcaggaaattgaagctccctcctggctgggtcactgacttgcctagtgaccttgaacaaagacttggatctttcatggtcacagtgtccttatctgtgaaattacctcttaggagtccctgaaatttgcaagaataaaacatagcattgggtttcaatacaatcataatgtcagagctctggtttagatttttgtacaggtttatgtttattccccctgttgtctgttcattcattcattcattcattaatgaggcatcctcatgctcctgaaagtcatgggtttgtggactcggtagagcagaaacgtttctgtggagttcccagctgtgcctgggaaagtgccagggggacgtgtgcaggcacaggaaacagcacaggagctgcagagtgaaagtgcatgtgacaagcgtagcccacaacctcctggcaaggggaagcacgtaaacaagaaatcagtgtttcatggaggtcactgtgcagcgcttgggaactacagacaaaaacgtgtccctgaggcagcccagtcaaggctgcaggaggaggcgatggcatcagagctgacctggggggtgctcaggaatggccagggtctgacatggggatacgctaggctgggtgccattgcaagcagaagcatcagataagaaatattaaggtagcatgtctggactctgagtcacagtgaaggattggcactttggttactctaagagaaatatatacatggtttttaattgattttcattgtacagttatcagatgacttgggttcatggactggtttgtgatatcctaattttgaaaacactctcttgtttctacctagacttttggatttcaacagtgcagttggccatgagcaagtcgacctggacacctgctggctgtcagaaaggcctaagctggctcccgatgcagaggacagcaagctcttgccagagccccgggcttttccagtaggagcggcttcctttactatcagtcaggtccagtcagcgaaggagggcctaggacagagggagttaaaatggggccttgctgtaaaggtgcctgcgaaagctggagctggagctggagccgtgctaaaaatcagagtggggacagggtgggaaagggtgcctcaagcaactcagatgacacggcccaatccatagattgtaggccccaacacccaggccgcgcattgggctgacgtataatatgcttttggcagagcttctataaggactcattatcaatttacatttagccaggaaagcatgaaaataagtacttcatgtaaagccattgtgcacatatttgttgctttaaaaaaaaaaaaagattcaattcattaggaaaagccagttctggccaaatattttgaatggcagccattgttatttttcattttctcccccttttgctttctctgtttccctggtttaaagtgtgcactctaataatttagaagatggcagaagcattcaagagcaggaccttctgagcagggcgaggctttgagttcagggcagttttcatggtagcatctgcctgtgctgaagcagaaaacagcatctgggacccctgtgacttgggcactctcagggcagcccgcagatggttgcatggggttcaggggcccttcccgcctggctcctcttgtttgcatcctgccctgtcagtgtggacctaggttcacactctgaggccctgcaaaacatgtcacctgtgggcacctccagttttccagtgcctggtccgcagctcatctcggcagctgcatccttagggccattcccaaaacctcaggtcacggcgggggcctagggggacagcaaggcctttgccccttaagcctgatgaaaatttgtaggaaagacttcagtgtccttatgaatttcagtgaagccgagtgggattaaggtgaaagacagaagctctaagtgctttcttcagggagataaagcgctggcgagtgcatcatttaaaccgaagatggagtgagcgccaacaggcactggtggttgttgctgttctaatgggattgctttgtagatggctcttcatggcggaacacgcgtgtgtcagtggggttcgggctgcgggtggcggctgagtgtccctgtgtgtctcttacaggaacagtgtgtggtggatgcagctctggagtacgttcccggcgctcaccagtttggtctcacccaaaacagccatttcatcttgccttttaatcagtcagctgtcagaaagaagtaggtatcattctaacatccttatgcagcgtctcattgctagatgtatgggggtgttctgcagccacagagtcttttccaaaagaacctgcttttattttacgatgaagtgcttgatttgcaaccaaatggcaaaaagaaggaattcagtgttggtgcaaatcacaacgctttcatggtggttcactggggagtctgtggtttctgccttttcccttctggagagtggctggcttcccctttctgtgtgcatgtaaggaagcgtgtgggcgtctaaattaagtctcccagatctattattgtttggactttcaaccccattccactttaagcattccctagtctgatgtctttgtctacccaaactcttacactgtggtggccaaaatcccgagtgccacacccacccctctctgcaccttctggccctcatacctgcctgtccctgggacccttctgccaagggaagatctcaaggcctggagcttggggctcccggactccatgttgctcctctctcctcctgaggtcctccagctcacctgccaggcttgcctgcagtctctgccatgccctgcccgtcttgttgtcattggctgtgagtgccaccctgtcatacccccttagacctgggctcctgtctgtcttctgcagctcctgccatcactctctgtgaattcaacagctgcctaacacctgacctttctgtgctcaaactgtgatctgtggaaggtctttccctgctccctcctcagccagcctcttccatggccatacccttgacttcttcacaggtatccatccctcccacagtctcgactttaaaagcctcctattagcaaacccctttcttcttgtctccactctgtgcctccccactcctgcagtttctcagctgcatggagacctctaagccgctagccctaatgccctcccaccaccatctcccctcttctctagccccaaatcacaattcatcccccagataggttccaggccagtgttacagatgtcctctgcaaaatcccctaaccctttctctctcccactcctgcgagcccaggtaaaagccaacattccgccttctgtgtgccagaacccacacgggagaccaaggccgaggagatggatgtctccttcctagctggtttgagctgggtatcatagccgtcaatctcagatggagcctccaaacgacatggggagccagtgcattgctctaatatgttcatggtttttattctccatgactacttcctcatagctgctcttagctcagagccctgtgcaccgcagtctctcttcccaccccagctgatgacttgcctcgttgagaagaaagagctccttcatccgtccaccaccaaaaagaccagcccctgcttttgttcctgaccctctatctcttctgctaccacagatgaagggtacttgttcctagcaaagcccacccgacagccccagcttgtcctctggattctcgatcccatctccccttcctaggacatgcacagcagccactcctcacagaccagcacacagatgccgctgtcaccccatcgtcagcagtgacagcaagagcagcaaactattgtgctggaggttgacacaaagatttttacacagatgccctaatttactcctcataattctcctatgaggaaggtattgttattatctccatttaacagataaggagattgaggtatagggagcctgaggcatctgctcaaagtcacacagctggtaaatggtagagctgggattcgaacccaggccttctggctccagagtctgtgcctgtagagtagtttccccttctcctcgggggatacgttccaggacccccagtggttgcctgaaacctcggctagtacctaaacgtcatatacactgtgttttcctatgcatgcatatctatgataaagttgaatttataaattaggcacaggaagagattaacaataataataaaatagaagaattataacaatatgccagcatcactcctcttgtgcctcgagggcattattgagtaaaatcagggtgacctgaacacaagccctgctgtactgccacagtccatctgcaaacctagacagctataaagtgaccaatgggctcatggctcctatggcgtggatccactggacacagtcagacatggctcccatggtgtggatcctctggacacagtcagacatggctcccatggcgtggatccactggacacagtcagacatggctcccatggcgtggatccgctggacacgggcagacatggctcccatggcgtggatccgctggacacgggcagacatggctcccatggcgtggatccgctggacacgggcagacatggctcccatggcgtggatccgctggacacgggcagacatggctcccatggcgtggatccgctggacacgggcagacatggctcccatggcgtggatccgctggacacgggcagacatggctcccatggcgtggatccgctggacacgggcagacatggctcccatggcgtggatccgctggacacgggcagacatggctcccatggcgtggatccgctggacacgggcagacatggctcccatggcgtggatccgctggacacgggcagacatggctcccatggtgtggatccgctggacacgggcagacatggctcccatggcgtggatccgctggacacagacaggattcactttctgggcaggatggagtgggatggcatgagatctcatcacgctactcagagtgatgcccaatttaaaacttatgtattgtttatttccagaacttcccatttagtattttcagacctcggttgactgcaggtaactgaaacctcaaaaagtgaaaccttggaaggcaaaaccgcaaataagaagggactgctgtaacctctgtgctccactccctctctcactttgacttctaaagcagaccccccacaggagacgtcacattcccccgcgcacacatgcacagtacctggctctgtttcccagcaaggctcttgaaagagctgccctttcctcagggactgtttcctcatttaaccatccggtcagcctcccgcacacccccagctgcccttgagagagttactcgagacccctgtgcagctacatggtgcggagccccctgcactgggctctcagcagcccctggacttcttggctgtcacagatgcacactctcctagttccctgctctctctcggcccgccttcctcagtctcccagctgagagtgctgggcccttccacacgctctcccaggatggccttctatgttcccatcaccttaaaatgccacctagatatggcagaacctacctgtgtagctctggcctccacttagaactcaggatttgtggacccaccagccactcgagatctgcatgtggactgggacaggttcctcagccactcaacatctctatgtggcctggaacagtctcctgggcctcatcaccccgaatggaattcgcaggcttccctcagtcctgctctcctgctctttgccgttgccgcgggcacaatcaccattcacctggttgcccaaggcccaagcctaggggctatttttcatttcactttttctcactctccaaatccagtccattggcaaatcctcttgcttcttcctccagaacgttacctgaatctgttctgagtccccaccgccaccctggtctaagccacccgactcctccctgttggctgtcgtaacagctgcctgatgggacccgcttcacccctgaccccctgacctgttcttcagtttagacagaggatcttttaaaggaattctcggccactccccctttcaaagccctcctgtgacttcccactgtgccgaaaatccaaacaccctcaaagcccctcctcccctatgatggagccacatctgccctcgtcctgtccctgggtgctccagtgacaccgtggtccctctgactgggcccacccaggcgcagccttcctccacacctgcagtaactctggttcccctgcggcctcaggtgggcttcctgctgtcccctgccatcaagccctcactttgcaggggcttgcccctttctgtcattcagacctcagctgaaatatcagctttgcagagttacccgtgttgaatgcttaaggtagccactggttggcctctacaggacccactttactgtctgatgtgtttctgtattagtttcatgagcaaagggatcttcctctttgttcacagctttatcctcatcctgaaacagttcccggcagacagaggtaggcagtaataactcattatatgaatggatgtgtaaatggatgaaggaatgaatacccctctctcctgagatgttcaatgtaaacgctgaaacaattgttaggtcctcttttgaggttttaaaaatgaaaagtaaaagtttcctttctcaatgctgagcacttgttttccccaggctctcggttgagctaagcatccgcacgttcgcctccagcggcctgatttactacatggctcatcagaaccaagcagactacgctgtgctccagctccacgggggccgcctccacttcatgtttgacctcggcaaaggcagaacaaaggtctctcaccctgcactgctcagtgatggcaagtggcacatggtacgatctcaagaggcttgtggtggctgcttctgagttctgttccatctatcactcaggttcactccatttctcaaaggcacattatccccattaatctctatctcgccgtgtgtgtctggtgtctcccccagagactacaagtcttgaaggcagggatcttttctgcttctgaaatatccccagggccttgcttagtacttgacatgaaatagacattcagcaaacattggcgggatgaacaaaaggtactagacatgttcttgacttggcaaggagtatgtaaagcccagcctcccctcatggcatttgctttctgataactggaactctggagcactttctggtgtgcagcacgctttacctgtgcctgtaatcggccagctgggttgttcttgtccactgcccagaaaagcaaatgcactaagaatggcaggttttgcagcaaagaaagagtttaattattgccgaggcaacttgccaggagataattctcaaagccgcctccccaagaattcaaggactagggttaaaacctcgtgtaggccgggcgcggtggctcacgcctgtaatcccagcactttgggaggccgaggcaggcggatcacgaggtcaggagatcgagaccatcctggctaacacagtgaaaccccgtctctactaaaaatacaaaaaattagccgggcgtggtagcgggcgcctgtagtcccagctactcgggaggctgaggcaggagaatggcgtgaacccgggaggcggagcttgcagtgagccgagatcgcaccactgcactccagcctgggcgacagagcgagactccgtctcaaaaaaaaaaaaaaaaaaaaaaaaacctcgtgtaaacaaggatagtttggcagccgggggataaggaatggcaaatgctgattgattggattggggaagaaatcatagggggtcgaagttgtcttcttgtgctgagccagttcctgggtaggggttactgctctgggtggtgccagttggttcatactgaatgcaaagtctgaaaaatatctcaaatgccagtcctaggttttacaatagcaatattatctatatggggcaattggagaaggtataacacttacgactattggctacgtgattcctaagcaataagtagtttaaaagggcaaattataaacaatgactggttagagtttatgcctacatcttagcaggagaaacaatggctggttagagtttatgcctgtatcttagcagaattcaggcccctatcacaattccaaccttgtggcatttccttaattttacaaaggcgattttggtccctgagcaaggagggagttaattttggggagggactgttaaccatctttgttttaaactgtcaactaaattcctcccatttcgggaagggactgttatcatctttgatttaaagttaaactatccactaaattcctcccatttccagaagggactgttatcatctttgttttaaactatcaactaaattcctcccatagctaggttgaattagcaaagacagcttatgaggttagaagcaagatagagtcagttatgtcagattcctcttgctgtcatttttctatgtcagatttctttcactgttacagtttttgcaaaggcagtttcatacctgcctcctttcttctgccaggctcatccacttttcgtcaccaactgtctaaaaatttgaaccatcctttagcattgcattcaggttgttatagctcttagaaacagatgttgcatctgttaaagtttatacatgtgttaaaagttttttcagattcctcaaaaattatgcatgttttcactttgctgcaggtcaagacagactatgttaaaagaaaaggcttcataactgtcgacggccgagagtcccccatggtgactgtggtgggagatggaaccatgctggatgtggagggtttgttctacctaggaggcctgccctcccagtaccaggccaggaaaattggaaatgtaagcagcattttccatactgacattttaccttcattgtggttgtgcttattttgtagaagagcatacctcacggcatctttatgtttaaattaccttgtttgaacctggggcttgtaaagaggtttactttgcaggcatgtccacagatcgtgtgccagggccaccccttagaacccgatcagtctttccagcctgttagttaatgaacatctccctttccgcagccacgtggccacagcacaattcagggaagcccagcaaatgcatattcgcacattagtaaactcagcattttttgatttccacaatatttcactaaaataatagaaaacacttccactgcattattagcaaagatactcaaatggtagctctaacttagacattcatgtgaagtattgtggcaattaaagttttaaaacaaaaagattacattttaatgtgttttgctgagaccagtctgatgaagtggaaggaaaatgtgtccaagcccttcccgttagaatcaccactgtctactcttgcatgtcatttggcttagatcacccacagcatccctgcctgcattggggatgtgacggttaacagcaaacagctggacaaggacagcccggtgtctgccttcacggtgaacaggtgctacgcagtggcccaggaaggaacgtactttgacggaagcggatatgcagctcttggtatgtgttagcaacactctcgaaggcagtccccggatgagtctgtactctaaagcgatgtggatccaagagtataagacaggacccactggacaaggctgcaggaaaaccacattgagtttagtattccagttgattcctaatttcttggcgtaaaaagccttctcaggtcttgtgctatctggatggcctgacaaagtctcccccaaggagtggtgtgactcctgacagaggccagacatagggtgctagtttcatctatagtttccccaggttctgtaatgcacacttactgtccaagttaagaaagggctttgaattaaaaatcagcagcataaaatgtctagaccagctggcgccagggaggctgtgcagaagtttgggtggggaagagggggaagccagcagaacatctctcgttcactctgtgcttcctttctgctgttcctggggctcaggctccagccctgctgggcagccccctccgtggcctcagctccccttgcaccccccagctctgggcataccatcttctctccttttcccttcagccctgggcatgggaacaactgtctgctgttgtcaatagccccagtgtggctccttggcttttttatcacctgaattaaaaaagcattccattcaatccccacctttaacaaacttagtatggactctgatacactcagtaaatgatgattcccccaagcacacagatactaggaaaataaagtggactattctcagatgatgataaagggattccagggatcaaatcccaacagctcacgggacagactgccgcagggaggacgtgtccacagggtgaggcagggccacgtgcttctgtggccacagatgaaggaggtgcctggccctgctctgacctggctgactgcatgcgtcttctttaaaagctccacgtcatctcccagatgtggaagccgaggctcagagggcaggagtgacctgctggtggggatgcagctggatccaaaggaggagctagagccaggtcccccaacccctagccaagaggccaaatgctcaacctgggcctggcagcgctcaccctgacttgggtcctccttgtgtgttacagtcaaagagggctacaaagtccagtcagatgtgaacatcacactggagtttcgaacctcctcgcagaatggcgtcctcctggggatcagcactgccaaagtggatgccattggactagagcttgtggacggcaaggtgggtgcttcctctccatgagggtcttcctccccccagtgtcagagacagagcaattgagaaacagcagattcaaattcacaactatctattttcatggagtcaaacaatggtcccattactattttaaaaacagatattgctacacaaaaacctttttggtttattttttaaaagcttttcaaaaataactttttatatgtttgaaagtaagctttcagcaaaattacaactataagacaaagaactttttttcctgaaccgtctgagaataagctgctgacctgatgccctatcccttctaataattttttttaactttttgtttggaaattattacagattcataggaagttgcaatgaaatgtacagggagggccccatgcaccattcacccagacccaggtttcccagtggtagcattatgcattttttttctttttgagacggagtttcgctcttgttgcccaagctagagtgcaatggtgcaatcacagctcactgcaacctctgcctcccaggtccaagtgattcttctgcctcagcctcctgagtagctgggattacaggcgtgcaccaccacacccggctaatttttgtattttttagtagagaccaggtttcaccatgttggtcaggctgttctcgaactcctgacctcgtgatccgcccgcctcgcctcccaaagtgctgggattacaaacattatgcatttttctagcacaatcaagatacttaattgtatcaatactacaaggctcccccttaataccccatcatggccacacccaactcctgtacccctaatcctaggcaaccactaatctgttcgctgtccctctaatttctgttttgccagtgttatataaatgaagtaacgcagtaggtatccttatgagatcagcttttcacactcagcctgatcttgggaaggtcatctgggtggttgtgcatatcaacagtccgttcccttttgtggtggcatattactctgtgggatagacgtaccacgctataatttttttttcatgtagaacgtgttatttttttctgtgactgttctgcccttgcttttcagcctctcatgtccctctcctgctggcaacaaaatgaactcaacaatttgcagtactagtcctttagtctcctgcttgaaaaccgcctccttcacagtttctcccagttctcactttccttcctctcccctttggggctgtctgggcgcaggcaggatgcggggaagggagtctcgatggcccttttcctttctgtgggctctctagtggacagcagctgagccatagccatatcgtggtcttcagggcagcctcttacagtgagtggtctggggtctcagtgttgcccctgcatgggggctgctcctggagagtttggccagcgtccctttcagctcaggcttctcatcctggttgtcatgagtagtgccacctcttcatcttcccacttccccgtggggtcatgtgcaaacttggggatttctgccaagccacacagaggccgtggggaatcagggatggtgtctctctggtcctctctctacctaactacattttaccagcatttctgcagcactgtggtcaatgtttgttgttgtgggagtaagacgcctgaattttccaacactagtgcctcttggaaggcaaggaacaagtctccatgttctagattccccaggacttaccggttgtttctagtatttccctacttactccccgctgggttttgacccctaggatatcctagagtgggggtggggaggatctgaaaggtcatgtctgaccttttgcccttcacctcttttccgattcatgacaaaacagaactaacttgatgtcattttactgcctctctacactgacttacagccaactttttccctcatctatactttaaaaacttctgtatctatgtgcatgtttttatgtgacatctaaaaaatgttaccagggccagatatggtggctaacacctgtaatcccaaaactttgggaggctgaggcaggaggattgcttgagcccaggagtttgagaccagccagggcaacatagcaacaccccatctctatttttgaaaaatattttatttagataaataaaaaattaggaatgcaatcagaagtgtaattgctgcaaacaatgtaattttctgttgtattatacattttacttcttattggattattatttatagttcttttttaacatttttagttgttacctaagggtttatgacatatccttaattgtcacagtccatctagaaataatattgagcagtttcatatatagcataacaatcttcaaaaagtacatttgaaattctttcctcctgtcttagtctgcttggggtgccagaacaaagtaccacagactgtgtggcttaaacaatggaaatttattttcttgccactctagagactagaagtccgagatcaatgtgttagtaaggttcattattctgaggcctgtctctttgacttacagatgcctcgttctccctgtgttctcacatggtcttccctctgtgcatgtctgtgtcctaatctcttcttataaagacacagtcagattggatgagggccaccctagtcactcatctttacttaattacctctttaaaagctccatcttcaaatacagtcacattctgaggtgctgggggttaggacttcagcatatgaattttggagggcggtcctcagcccataacacctcctatcctttgcaaagctgagatctctttacttgctgtgggagagcatctacagttcatcagaagagagttagtaaatattcgctcataggtgctatcaataggtatgaccgggccaagtgcggtggctcacacctgtaatcccggcactttgggaggccgaggtgggcaaatcacctgaggtcaggaattcaagaccagcctggccaacatggtgaaaccctgtctctactaaaaatacaaaaattagctgggcatggtggtggatgcctgtaatcccagctatgcgggaggctgaggcaaaagaatcacttgaacccaggaggtggagtttgcagtaagccaagaccgagccactgcactgcagcctggacaacaggagcgaaactccatctcgaagaaaaaaaataaaagtatgaccagcacctccagtaaggctattagctcctaaaatgtcctaaaattgaggccctcatttaaggatgcagtgtgctcagacttgtggtcatgaaggtggccatttgtgctttctggaatttggggaatagtataacatctgaatctttttttttttttttttgagatggagtttcgctcttgttgcccaggctggagtgcaatggtacaatcttggctcaccgcaacctctgcctcccaggtttaagcgattttcctgcctcagcctcctgagttgctgggattacaggcatgcgccaccacgcctagttaatttttttgtgtttttagtagagacagggtttctccatgttgctcaggctggtctcgaattcctgacctcaggtgatccgcccgcctcggcctcctaaaatgccaggattacaggtgtgagccaccatgcccagccatctgaatcctttaaaaggttatttttcaaaactattttctgtttctcctggttagctctccttttaaacataatgctgcaattttatccactccaagagcttatacaaatggactgtgttccttaaatacacaaaaactcaccaagatatttgcttttaggtcttgttccatgtcaacaatggtgctggcaggataacagctgcatatgagcccaaaactgccactgcgctctgtgatggaaaatggcacactcttcaagctaacaaaagcaaacaccgtatcactctgattgttgacgggaacgcagttggcgctgaaagtccacacacccagtctacctcagtggacaccaacaatcccatttatgttggtggctatcctggtatgtacgggtacctgctcttccactcaaaaggggcactgtccctggaggaagtcttggttcaggtggatgtagaatagggattgagaaaggtacatggtttgggtgacaaatcctttaccattttagaaaggctgtttcaaatatctaagaattcttggaaaacttaaaataatctacacacacaagttaatcattgggtaagactgtgagaacactgggtctgatataaaggcagctgtatgactttaccgaagtaaatttcatgactctcagacttgggagtcattttagggctagggaatcgttttaggaaacaaccttgtgactcatctctctggtcaattttggattagaattatgtattttagatgttccaaggaattgttgcaaataataaacacctgttgtatgactttttttaagttataactatgccttaaaattttatatattaaaagtttttggccaggtgcagtggcttacacctataatcccggcactttgggaggccaaggtgggtggatcacttgaggtcaggagtttgagaccagcctggccaacatggtgaaaccctgtctctactaaaaatacaaaaataagctggacgtggtgatgggtgcctgtaaccccagctactcgggaggctgagacaggagaatcacttgaacccgggaggcagaggttgcagtgagccgagatcgtgccactgcactccagcctaggtggcagagtgagactccatctcaaaaaaaaaaaaaagttttctctgaattctgcaagtcactgacaccacatatgtggaagatattctcctaattttgatagtgaaaattttaaaaaataaaaaaacccacttgagattatttctgttgcttttgtgctatggatcgcatttcaacaaaattaagcaagatttgtcttctcttctttcctgaacagctggtgtgaagcaaaaatgcctgcgcagccagatctcgttccgcgggtgtttgaggaagctagctctgattaagagcccgcaggtgcagtcctttgacttcagcagagcgttcgaactgcacggagttttccttcattcctgtcctgggaccgagtcctgaacttgaagcagaatcctcagttggaatcattgctgatattttgaggagaagtgtatgtgtgaattaagaatctcttcagttcatatttcatttccaactcaggttaagtgtttctggggagagatgttgtgtttacgttacactaaaaccacatgtgcaacaaatacctccattaaatggtctaaaatgtaaattgaattccctggctctctttttaaacgtgtttgttaaaaaatctttatgcacattgaatgttctgttgattacttgatagtattttatgtttttcattttgagctttttaaaaaagtatcaatacagatgatagcagatca

SEQ ID NO: 87 - DNA, 32682 bp, Homo sapiens
  source 1..32682: mol_type = genomic DNA
acacgacctcttccccaataacctatggaaattaaaaaattttaaaaaataaaatagctagtaatattacaaaacacccatatgatgcaatgttataccatcactcaatagcattttcagggccatttgtcctgtaggtgttaaatttattaaatacttattatatgccaaaatgtaaaacatggcttttctttactattcagacactataagaaattttgaggaacaaaggagatagagatgatgataagtgtggttgacagaattgggggaaaaaagtgatcttagaagaaatttaagacagtttagaataacagcactcaaagagtgtaagaagtttggagaagccttattggaagaggaattagaacacctggagaaacatacagtaagaagtgatgaaggtctactgaactgatgagctggaggagttggagggtgaatgtttcttgtaaaacactaaaatattattctgggcctctttttcctgttcccagaggtaagtcatatcatacctttgtctataaatgtacaagtctatcagacctttgtttatgaatttacaggcctcttagatctttgtctattaattcacatacttattttatccttattagtttgtgtttttaaaatttttatcaaattggtttcatactgtacatgctattccacaacttgttcttaacaacactgcttaatagtttcattttaagtgtggtgcttacgaaaggttctagtacaaagttacaaaaagtttctttctattgctggaatgttctgcgctccccaccattccactcccctgtccctaagcagcccccactttggtccgtgttgaatgtatcgaacatattttttttcacatttgttgcaatcatcacaaaagtcagagagtgctcagaaaaagagaaatggagatggtgggccctggctggtcaaaggccccagagacggacctagaaaatgttcaataaagcgctgtcactgaactggacctacacaggaccgggtctgggcaccctgtatcaatagcaatgccaccctgaccagtctcaggcaccaaagacgaacttaaaacttttggaaaaagattcccccatatatggtaacctgagctccagcttccccacttcccatggagtcgaccagaatcccagaggaactcaacagttaagcctatagagccagactcactgctctagtttcagagagtggtctggcaagctcatcactctggctagctggcttttttgtttgtttgtttttttcctgcacagtgtggaagattggtacacccgaatgtaccaatggtgcaggcacatcgatgtgcgtgcacgtgtgtgtgtgtgtgtgtgtaaaatgttgttttcatataatattggagggcacatggtatgatatcaacatgatttatcatggggatattaggattgatcacttggttaaggtggtgtttgccaggtttctctaccgtgaagttatcacttttccctttccatactctatttttggaagcaaatcatgaaatccagcccacactgaaagagagggagagggataagcttctgaaaatgggagtagctacatgtcttatttatattttcataagaaagacttgttatttaattgttcatttatgtcagtataaactcatatatattatatactttgggttataattcaatgccacattatttagttgctcaaagtatctcagctttggggcctctttttggttggctcccctatgcctttgacaggtctctatactttgttttctttctggcattgcaagctgcctcaggctcatcttatatttccctttcccagccctagaaatggccatttcttaaggaaggcctggttctctttattagagaatggttttacaaagatctgagtgctgggtattctcattgctaatgggatatcactgcttctagaccatttcagggaatggagctaagaaaggtaggtatgaatactaatattcatatcttcatttgaatacacacacacaaacataactgtaattatttctgtacgtatgtagctatctttctggttaatgatgagttcatactgatgtctctgactctaatccagaaccacaggacttattctagccttcctccttgcctctatgacagcaagaaacttctcttccactatctagcctccatctacccatttgttccacctcaggatgcatgtaaaggagtttcagagttataaacccatttctccatgaaaatcaaatttactaactagagtgcagtgtttacatacagttccttttgtctttagccatacgatttccagtcaaaacattattctccaaagtcatgtaggtcagctccatttttgcattaccatcttctgtgaagtcatgacaggtgactttgggtggctcattcacactgaacacaaaataagtttagggcactggcctttgacttgcctttgggcttgagctgtatgtgtgggccacccagcagctctttccacctaagtaggctttgcctacaatacataaaggtagcagcagtggtgacaggtatcctttacccagtgcattctctgccacaggtacccagggtggtcactccatttctctatagattccacatcaattgtcaggcagtctttgagggtgaccatgcctatctcttccaagggctttgaagaccatgggtctgcaataccagtggacccttccagtggatgtcctctcttgcctccatcgacatggttacattatgcttccctgggttggttttaaagtcctgccaaacatttcttggaggaatgtgaacactctttttgtttcaccttaggcccctcacctattcttactgttggtggttgtgtgtggaaggcaggggtgtaagtaacattaaaataggtcacattgtagaaatgctgtgatcatgtcctaagaatttaggagaaaacgtggtcgaaagatgtgttgttctctttatgttaagaaagtctgagtagtaaatttaacatgacagagatttgcatttgtgcttattatcagtgaaacacaagagtcactggaagccagaattgagggtgacgtgatggatgatgcaggatcataagtaatgatgtaaccagctttaaattaaatcaatggtaatcgagaactgtagaggcaagaagatttatttgtttcaatacgaacaacctccaaagagacattgtgtcttgagtaataacagcattgctactttttttttttgagatgggagatataaagttagcccggaatgaaatgcatttgacaataaagaacgtagttccacctcaggatggtaccaataggtaccatcagggtaccaacagggtaccaacagggtagacctgaacaggaagagatggtgcctgaacattaagaagaatcttcatgtgcaccaattggacagtaagaaactatgtcagtctggcttctatactcgttattctaaatctcaataaattaatacagtttacatgagtgcatgctggtgttgcataaatcagagggcactattaatgtaaaataaaatgcgaagggtgcctcctggaatttagcaacgtgggctatttttattactattgttaacattttagggatttggtttatgaaagggcagctgagattgtgataaggcagctattttgtgacagatgagctggatacatggaaagtacacatggaagcccatcattcctacccttccctgctgacctaacaagtctctttgctcttcttaactactttacaaagtccagacctgactacccttccaatctctttttcttcctgccttcaatgccctaatcagtttgaacttcatactattcattagcacaccatgcttttcatgcctcccttacatggattcctattatctggaatgtctttctttgtcttttttatccgtttaatccagctgaaatgttacgttctttgaggaaatttttctgaatagagctggtcatttctttcctgatggtccttgactctttgaacctgacttattacagcactcacattctttttaaaaacttcatgttaatatccacatttatattttattataataattgtagattttatatctactttaaatatatatgatctgagtcccagggcttgaatttgaacacacaaggttctgacccctgaaagctgactcatttaatggtgtcagttcattacatatctctctcttcaactagatagtgtttctcatcagaagggatcatgaattagaagtccatgtatctctcctggtacttagtgtaacctggtacatagtaagtatgcaattaaaattagatgaataaattaatttataccatgggctttaaatattctaaactacaaatcacagaatcctgacttacaataatttcctggacttccaaaatagcatatatagtatattgaattttataaatatttgaatcatgagaatttgtgctttaagaaaataaccatgattcattttatttttcaactttgaataataacaatttctccacattaagaagtatcaagaactgcgtgtccgaaggtggcagacatagtaatgtctcatatggtggtgtcacttttgtatcactttaattggtttagaattatccaaattatctctctcgtgtgagtaactgatgaataaatacatgaatacatggatggcaccaaaaaaagaactttggcattttgatatttatcttttggggaaggtagaatcttctgaccagtgaaatattttatgttaataaaatgttatgtgtgatggttgatgtacagggggagtaatagtcatttgcccattttacttaattcatgtgtatgctgtgtaatttcttcaacactagagtgtgaagcagttacttggacaatatctgaaaaatactgcatacaaatgaacaaattacttttccatatttactctctatctccattcacgtctcactcagttctttttgttgcaaaaatctttattcatttggtcaattgatatctgtgccctggagactggtttcttaaaaccccagcaaagagtctcaagggaagaattgaaataaggagctatttgaaataagaattgaaataaggggtgttgtaaataccaaatagaggaagtccatcctgtttgtgtggggagaggtcctcatctacctcaggtggagtaatttggttggtgacttgaagagccatccagatgagtattaggagtcataaatatcttcaagtgatggaagaggacgcctgcaaggcagacacatgctcccaagcttccaatgaggttatcccatgtctttgggcttggcactgggacattagagcagaggctacaaaggagcagagcacagagtttagctccaatggctgccaagaagactacgtgccaaaattaggatgcttctgcactataggaaagatgatctcttggttttaaaaactgtaatagaaaaaaaattgtagaacaccacaaacaacacccaaatactagctctacttattctttccactgcctgaaggattggctcttctatactcagaacagtcttggatgacacagctggcctccctaactttgtgatggggcagacaacagatgccatgtttggacaatactgactcagtgcaaagatgaccaggaggcattgggaatggcaatggagatttcttctgacctagcttctgactttttttaatgacagaaattgtgaggccacagtaaaatccactcacaaatttcttacatcccgcagaatacaagagagcacatatgttcttattcttttttaggaacatcaaaaataagagcatttctctaaataaaacagagcttgtttagaaataggtagtctatcttctgggaagtggcatgacttgcttaagaataataaataataattctagtttttattctatatattttctatgataagaatatatattgacaattctctctctctctctctttccctgtgtgtgtgtgtgtgtgtgtgtgtgtgtgtgtgtgtcttagtcttctcaagctgtcaaaacaaaataccatagcctgggtgacttaaacaacagaatttattttctcatagttctggaggctagaaagtttatgatcaagattctggcaaagtttagtttctggtgagggctctgttccaggcctatagttgaccaccttcttgctacgtccttatatggcagagaaagcaagcaagctctttgacattataggggtagcaatctcatcatgaggctcctgcttgcatgatctcatcgaaccctaattacctcctaaagactccatctccaagtgtcatcacattgggggttaggacttcaacatatgaatttgctaaggggaagagagagacacaaacatctagtccataacagacagtgaaatctcttgactaagtaaggaattttttctgaaacttctataacaatgagccatcactgaaccttgtgaaatgctatagtttaaatgcatgtgttgctccaaaattcacaagtaagaacataatatccagtgtgatagcaataagagatagagccttttgggacgtgattaatccaccctcatggttgcattaatgctcttataaaagaagctgaagggtgccctagtgcccttttggcattccctttcttctgacttgtggggacacctaaatgagaaacagtcctcacccggcacagaacctgttggtgccttaatcttggacttcctggtctctggaactgtgagaaaaacatttctgttgttttcaacttacccagtttcaagtgttttgttatggtatcacaaatgatctaatggactaagacattaagaaaagggagtattagtattcagcaatgatgctgatgatggcagatggccatggacaccctttgttatttctaataccctgtcattgctatagaagctgggaagagaaggagtccatatgaaaaagtcattacaaaaaaagatttaggaagtgttattttctgtgcaagttattgttctaggagatgctttaaaagtgtttttctctcaagcagttgacagtctctttgagcatgtggaccagttctgctgttttaaggagctatgcccagcctagcataggcaaccaacttacagaataagaaatgctgttaatggaacatagatttttgtaaaatgtattttcagttggcccttgacttactttgctctatctctgcatgacccgtattgatgtcttagttcaccttgctgaccttgaggcacttctatccttttaagtttggcaggcaagattggttgcctaatctgactgactcctttgaatttgttcccgtgtgggagggagaaaaaaatgtattttttttccctttacaaaccagggacaagatccctttgatgaagtgaaatagtcttctttttttaagcaaatactttatttataagtataatagcttttggggggcagcaaatgggaaaggtgaagtcttgtactctagagcatgattcaaatagataggctcaaattaaacaaatggagggatagtttgttctgcctaaaagcagtaataggaggggaatctagaagctgggtctggatgggaagacattaagaaaggagagggagagagagcaagcaagaaggaggtcggtcagggctctacaagaagagagtcaggtggtattgatacgagtggaaaagatctttttatgttttatgcctagttccttgatacaaacttgtggtggggggttcttgaaaaagtgattggggactatctgatctggggtttagggcagggaagaaacagcatgtaaaggagaaaagacagagcatttgttaaagagaatttaacagcaagaggaaataagaaccaatgataccaaggataaacgcagtccttaactcccctatcactgaattcttagaaatatgggggtaggggtggtggtggtaattctgttttctccccataggtgagataagcattgggttaaatgtgctttctctctctccctctcctttcttaagaattaagggacagactatgggctggaggactttgaggatgtctgtctcataacacttgggttgtatctgttctatggggcttgttttaagcttggcaacttgcaacagggttcactgactttctccccaggcccaaggtactgtcctcttttcatatctgttttggggcctctggggcttgaatatctgagaaaatataaacatttcaataatgttctgtggtgagatgagtatgagagatgtgtcattcatttgtatcaatgaatgaatgaggacaattagtgtataaatccttagtacaacaatctgagggtaggggtggtactattcaatttctatttataaagatacttatttctatttatttatgcttgtgacaaatgttttgttcgggaccacaggaatcacaaagatgagtctttgaatttaagaagttaatggtccaggaataattacatagcttacaaatgactatgatataccatcaaacaagaggttccatgagaaaataatctgaaaggtttaataagttgtcaaaggtgagagggctcttctctagctagagactaatcagaaatacattcagggataattatttgaatagaccttaagggttgggtacattttgttcaagcattgatggagaaggagagtgaatatttgaaaacattttcaactaaccaaccacccaatccaacaaacaaaaaatgaaaagaatctcagaaacagtgagataagagaaggaattttctcacaacccacacgtatagctcaactgctctgaagaagtatatatctaatatttaacactaacatcatgctaataatgataataattactgtcattttttaatgtctataagtaccaggcatttagaagatattattccatttatatatcaaaataaacttgaggggatagatcattttcatgatatatgagaaaaattaaaaatcagattgaattatttgcctgtcatacagctaataattgaccataagacaattagatttaaattagttttgaatctttctaataccaaagttcagtttactgttccatgttgcttctgagtggcttcacagacttatgaaaaagtaaacggaatcagaattacatcaatgcaaaagcattgctgtgaactctgtacttaggactaaactttgagcaataacacatatagattgaggattgtttgctgttagtatacaaactctggttcaaagctcctctttattgcttgtcttggaaaatttgctgttcttcatggtttctcttttcactgctatctatttttctcaaccactcacatggctacaataactgtctgcaagcttatgattcccaaatatctatctctagcctcaatcttgttccagaagataaaaagtagtattcaaatgcacatcaacgtctccacttggagggcttaaagacgtttcaacatacaaaccggggagttttgcctggaatgtttcctaaaatgtgtcctgtagcacatagggtcctcttgttccttaaaatctaattacttttagcccagtgctcatcccacctatggggagatgagagtgaaaagggagcctgattaataattacactaagtcaataggcatagagccaggactgtttgggtaaactggtcactttatcttaaactaaatatatccaaaactgaacatgtacttagttactaagtctttgactttatctcattcataccactcagctttatccaggccacttatttgacagtattattgcgaaaacttcctaactggtctccttatcatagtcttatccccttttgaaacaaaagagacagtttcaaaatacaaatatgatttttattagctcccttttgttgtctataatagtcccagaaggagttataaactccatttaaaaagtctttgagatgtggcccttgccaactttgccaggaattcccaatatctagtattttctactattaaactttgtgcctcttcaaaactgcattttctctcattccctaagtgtgcattgttttcccttaccggttggtttttccaccaccttttacattttcctggaacactataccctccctcttcatttggcccacctctaattttctttcagatctccatgaagatgttacttcctccaggaagccttatctgacccctccaaagatgtcatgagttcctcttttcattctactaatcacagcatccatcacaccatgttgtgattactgatactattgtctgtttctctgattaggcagtaagctcaacaagagctacatggtgcctgtctcttgttgctgattattcccatccaaaaacagtgcctggaatgcagacttaacattttattgaatgaataaataaaaccccatctatcgagtgctactttgtgcaagacccggttctgaggcatttatatttattgatttatttaattctcatttaaccatgaaggaggtactatcactatccttattttatagttgataaagataaagcccagagaaatgaattaactcacccaaagtcatgtagctaagtgacagggcaaaaattcaaaccagttccccaactttacgtgattaatactgtgctatactgcctctctgatcatatggcatggaatgcagacatctgctccgtaaggcagaatatggaaggagattggaggatgacacaaaaccagcataatatcagaggaaaagtccaaacaggacctgaactgatagaaaagttgttactcctggtgtagtcgcatcgacatcttgatgaactggtggctgacacaacatacattggcttgatgtgtacatattatttgtagttgtgtgtgtatttttatatatatatttgtaatattgaaatagtcataatttactaaaggcctaccatttgccaggcatttttacatttgtcccctctaatcttttgatgagatgatcagattggattacttggccttgaagatgatatatctatatctacatctatatctatatctatatctatatctatatctatatatgtatatcagaaaagctgaaatatgttttgtaaagttataaagatttcagactttatagaatctgggatttgccaaatgtaacccctttctctacattaaacccatgttggaacaaatacatttattattcattcatcaaatgttgctgagtcctggctatgaaccagacactgtgaaagcctttgggatattttgcccatgcttgggcaagcttatatagtttgcttcataaaactctatttcagttcttcataactaatacttcatgactattgcttttcaggtattccttcataacaaatactttggctttcatatatttgagtaaagtcccccttgaggaagagtagaagaactgcactttgtaaatactatcctggaatccaaacggatagacaaggatggtgctacctctttctggagagtacgtgagcaaggcctgttttgttaacatgttccttaggagacaaaacttaggagagacacgcatagcagaaaatggacaaaaactaacaaatgaatgggaattgtacttgattagcattgaagaccttgtttatactatgataaatgtttgtatttgctggaagtgctactgacggtaaaccctttttgtttaaatgtgtgccctagtagcttgcagtatgatctattttttaagtactgtacttagcttatttaaaaattttatgtttaaaattgcatactgctctttcattgaagaagttttgagagagagatagaattaaattcacttatcttaccatctagagaaacccaatgttaaaactttgttgtccattatttctgtcttttattcaacattttttttagagggtgggaggaatacagaggaggtacaatgatacacaaatgagagcactctccatgtattgttttgtcctgtttttcagttaacaatatattatgagcatatttccatttcattaaatattcttccacaaagttattttgatggctgtatatcaccctactttatgaatgtaccatattaatttatttcctggtgtgggttatttgattttataatcttacctttagaataatgaaacacctgtgaagctttagaaaatactggtgcctgggtctcaactccacagattctgatttaactggtctgggttacagactaggcattgggaattcaaaaagttcccccagtgattctaatgtgtagccaagatcgggaacccttgtagacagggatgataggaggtgagccactcttagcatccatcatttagtattaacatcatcatcttgagttgctaagtgaatgatgcacctgacccactttataaagacacatgtgcaaataaaattattataggacttggtttattagggcttgtgctctaagttttctatgttaagccatacatcgcatactaaatactttaaaatgtaccttattgacatacatattaagtgaaaagtgtttctgagctaaacaatgacagcataattatcaagcaatgataatttgaaatgaatttattattctgcaacttagggacaagtcatctctctgaattttttgtactttgagagtatttgttatatttgcaagatgaagagtctgaattggtcagacaatgtcttgtgtgcctggcatatgataggcatttaatagttttaaagaattaatgtatttagatgaattgcataccaaatctgctgtcttttctttatggcttcattaacttaatttgagagaaattaattattctgcaacttagggacaagtcatctctttgaatattctgtagtttgaggagaatatttgttatatttgcaaaataaaataagtttgcaagttttttttttctgccccaaagagctctgtgtccttgaacataaaatacaaataaccgctatgctgttaattattggcaaatgtcccattttcaacctaaggaaataccataaagtaacagatataccaacaaaaggttactagttaacaggcattgcctgaaaagagtataaaagaatttcagcatgattttccatattgtgcttccaccactgccaataacaaaataactagcaaccatgaagtgggtggaatcaatttttttaattttcctactaaattttactgaatccagaacactgcatagaaatgaatatggaataggtgagatattttgtgtttttcttgtcttttctctatatcaaaattttttaaattataaaatttgcattaatttgtcttgatttattattcatatttattattccacatggagaaaaaatatttaactgatggatatatttaaatgaaagataaacttgtaactttacaagaggtttacaaagttatagcagtgtttaatggatgaatggtttgtatgtttcatgttgaattaatttttacacttcaatggtatgcatattaactttgaaaaattatatatatacacatatatgtacatatatatgaatataaataaaattttatatgtgaagaagccagaattatgctccttcacataactccctcagactagtaaaatagataaaatctttgtttttaatacagaaaaatgggtcattatttgatggtctgaagaagaaatattgtgactgggatatgaatggcaaaccgtagtataactatgttcaaaagaatgcctgaaatatatttttaaccatttgactttcaggacagttacagcactacagtacagggaaaaaccaaacaactggaagacaaaatctggattttagtgataggtctactataaattatgcttgttaacttcattccttagtttcctagttttcttttcctcaagtataaaattaagatgcttaggttatccctaatgttcttttaattctgaaactgtacagttctaactgaaacacaaacattcatatgtaacaatgattactttcttggttgcagttgaaaacacgtttcatgaagtttattttgctttccagcttccatattggattcttaccaatgtactgcagagataagtttagctgacctgtaagttttgcttatataaatgtactttaaatgtgtaaagcaaggataagtaaatacttaaataaaattgggtacccctgtgagctcttaaaagcacaaaagcaatttggacaatttcaagaaaagttactcatactgaatatcaacttgatgttgaagaggttaaactgttgactaatgtcttcgacattgaccttttgattccttgaaatctcatgagtcaaaccaaatcagattttagaaactgaagattagtgtctgatcagtgacagccatatactaattcaggaatttttctcatcagtaccaacagggtgatattataatgttttcttttctgtatactatttaaatcttagcagcaaaccataggtgataaaatattctatttgctgttatttgtggagagtatgttagtctcttggatgtctttccattccacattttaaaaatttctaacaaagaatttaaagtagtgtgttgctgttactccttgcacatccaaacctgcataaggattgctttgagtcaatccatgagcactgtagtcttgggttttagaccttgatcatactgggaatagacactgttagaggtctgtctaattaccaatttttttttgcttaaatttaaaagtaaccataaagaatatagataccctcaattatgggtacattacagtagatggatggtcacagaaggagaaaccactcttatgggaaatccacttattttagcctttaacatctatatgtatatttatggcaaaagaaaacaagaaaaagactaaagtttcttctcagatgacctggaagctaattttacataattttacaaatcaaatgtctaaacagattacaacataaatagaaaacaaaacaaacaaatgaaaaactatacttgagaaaaataagcttgctgcaggtctgttccttaaggattcacacgtatttttgtttcagggctaccatattttttgcccagtttgttcaagaagccacttacaaggaagtaagcaaaatggtgaaagatgcattgactgcaattgagaaacccactggagatgaacagtcttcagggtgtttagaaaaccaggtgagtgaataattttaaaaaagcattgtgatatttgacaaaaatttagcatgctgaagagaagatacaaaaatagcagtgaaaaatgcatttatatatttgaagagctattgtatgaaagagggattagattcattctgaattgctaaagagggcagaagagaacaataggtagttattataaagagaccatataaatatgatgactgagagctaaggttctgaaataagattatcttgatgactatgggcatattaacttttttgagcttcagttttcttatctgtaaaataagggatgataatagctcccatttcatagttagcatggaaattgatataacagcaatagtagctaacttttattatacacacaatgtgactggcattattctagggagcataatgtgtatattgataataaaaatattttatgacataggggatagatagcactgatgaatcagaatggttgtccagtgagtcaagagatgctggctcgggcttctgggcaggatatcagctttgcttacctatatttatttattaaacatttaaaataatccttgaagatagatgctaatcttccaactgaggaagctgaggctcagagaatttaagtaactttcttatgggaaccaccaaatggcagagccaggatttgaactagaccatctggcttaaaattgacagtcttagtagcttcattacactataactatagtgaatgtaagatgcatagcacatcgttagggttgccaggtttagcaaacaacaacaaaacataatacccagttcaatctgaattttagataaacactaaatacttttcttagtataaggatatttcattgtagaagctcaacaaataatatttattatttattttatctcaacatagaaacaaacttgataatgattagaactctccaattataaaacaacatgcccagagaatactctgttatggtggggttaattaggtggctgaaagacaatgtacctggaatatcatagaagagatgctcctttaaggatatagtttaagttctttccaactttgaaatttatgaattgacaaaaatttctgttttgcatctctatttttgtcttgttctgataatcttttcaaaatgtgtataaaaaaacaagaatacattatctattgcaactttacaaccaattagaggttcaaggtaatgttacagatcgctgatttattcttgtaaattcaaaggtatgtcttttaaatgaggattgggaattagaaatcttacgtaagccttccaggattctctaaatattactgtagcagctataaaagctacataaaagttccctcagatacatgaaacacatgtattcctcagatgctttctgtggaatattgatgctgtcatctgagtttggtaagggtaagtcacagaggaggaaacacatacattttaaaacattttagctaaatatgtaattgtggccaagaaaagtgtttttttaaaaaataattatttcatttcaaaatcatttttatttataattgaaaataatatgcagttttttattgtcttgtaaggatggcatgtaaaatgagcatttatgtctgaaatgtggtatgtctgtgtgtgtgtgtgtatatgtatatatatgtatgtatataccataatatatacatatgtatttgcaattccaaaagttacatctttaatgagaatcatgaaaatattattttgctcagtttctttttttatttaaatttaaatttaaagttctggtgtacacgggcaggatgagcaggtctgttacataggtaaacacgtggcatggtggtttgctgcacctaccaacctgttgcctgggtattaagcccagcgtgcattacctatttttcctaatgctctccctccctgcactccactccctgacaggccccagtgtgtgctgtttccctccctgtgtccatgaaacatggtttatatatttataaaagtttatatatcctagtccaaatttttgataacacaaaaaggaaaaataaaataattcaaaattgggaaagagaaacaaaagattgcatggcttttttccttttattgtttggacattaaagtctcattttccataaggcagcaaagaaatctatttcatcaggctgaaacaaaatacattagaatttgtatggaaaatttttcagaatctatagttctgattttagacattagaaaatgtttcatgtgtcttatagatttttaaagcaaagttagttgtctttctccaaacataaaatatttcttatagctacctgcctttctggaagaactttgccatgagaaagaaattttggagaagtacggacattcagactgctgcagccaaagtgaagagggaagacataactgttttcttgcacacaaaaagcccactccagcatcgatcccacttttccaagttccagaacctgtcacaagctgtgaagcatatgaagaagacagggagacattcatgaacaagtaaggatccagtttaaaggtagatgcaaacctcagaaacacagcaatggcaagcctaatttagtatttttgcaatgtactcatgtactcccagtaagaggtataatgtttctttggtgttgtgtctgctgaggtcccagacaaggtaattaggagagcaacattcaatgtaacttggtttccatagcacgctagatgtagtacaaaccacaggacaaacctaccagaggttccattagtcccttgagagatatacaccttttttttttctttttacccattctactctcaattttaccttgttcaagaatatattagtattgcaccaaattgatgctttccagagccatatattggtgttttgtgttcacctaattgcctagaaataaaagttagagatccaagcatggtcaagcatggtcaagatacacagacatggcaaaggtttactgaacacttaggatgttgtggggccgggcgcggtggctcacgcttgtaatcccagcactttgggaggccgaggcgggcggatcacgaggtcaggagatcgagaccatcctggctaacatggtgaaaccccgtctctactaaaaatacaaaaaaaattagccgggcgtgatggtgggcgcctgtagtcccagctactcgggaggctgaggcaggagaatggcgtgaaccctggaggcggagcttgcagtgagccgagattgcgccactgcactcccgccggggccacagagcgagactccgtctcaaaaaaaaaaaaaaaaaaaggatgttgtggaaacatgtctgcttgcacagaggatcagattaacactcacaaacaaactttgaagcctccttctcctcttcctcttcattcttcttctttcccccattttgttgataggaaattgaaggttggaaggctaaaacaactggctaagggcacacagctagtacatttgaccccaggttctctgttggagaagcctgtacgtaactcttcatcacttctgccttccatgttacttcctaaaccagataaatagagagattgcccttagaacatctctgctatggcgactatccaggtgcataaccccattctgcactgacaagggataaaatgtccatctttctgttgcacttagcagaagtctggctttgctgatccctgaaacatatctgagtaggcttattgaaaaggaccttttaataagaatcatggttagcatgtctgcctattttcttctcataatagaatctggtaccatctgtcagatatttttccccccaggatctttagtgaggaaaattttgacaacatgtggaaaaaatatgatgattttccccttaggaacacagtaaagacaaagtcaaatgcattttgttgttgttgtttttgaatctttaaataaatcccagtgtccagttccaagcagtagtagtcctatttttaggtgtttataaatcttctagctctattttatttcacagattcatttatgagatagcaagaaggcatcccttcctgtatgcacctacaattcttctttgggctgctcgctatgacaaaataattccatcttgctgcaaagctgaaaatgcagttgaatgcttccaaacaaaggtatcatatttgcgtggatatctgaaccagtactgtagtctatgactcattaaaacaaaacaaagttaaaaatgaaaacgtgcttaattgtggagagtatcgtttttggaatagagaaatagttcagcagtctgatattcttcgagtgaacaaaactggatttgctggtttttattatctattcattaagtcaacaataattttattattaaggaagtgagtttgatgggataaagaaggaaagacagacagacagaaagagagaaagagagggtgctataaatgggaaggagtaagtgaaagaaaacggagaaaaggaggagcagaggagagagaaaaaatgaagaactatgataaatgctttatacttactgtttttttaaaccttagaacaaatttgaggtgtaagtatttttgtcctttaacaaactaggaaagaggtttagagaagaaaattttttttaggtttagagaggtagaataatatccaccattaactacttgctaccagcagtcctataacaaaaatttcctgagaactgactactctcagtgtcaagccgtgatacaatcgtattttttgtaactgagaagacacttaagaaattagcaggcttcaatttgtctttaagctgtttaaaggtacagttgttcatttatgatccccagtataaaagttatgtttttgtttcaaggtactttgagtaaatttgtctggcacagatgcatataaactaacccaaaagaataaatgagtcaataatattctgcgataatgtatgacatttataatttttagtaaaaaacatattttatggaatttcattttacctatacttgttgtttttctaaatattagagcttgtaaagaaaatgttagtatatgctttcatgacattttgtttcctctacatctaggcagcaacagttacaaaagaattaagagaaagcagcttgttaaatcaacatgcatgtgcagtaatgaaaaattttgggacccgaactttccaagccatgtaagttcaagttctatctagggaagagggtgagagctacagaactaccattttgcaatttgggttcgtttttttaattgttgctgttttagagaatgaagacccctttgtgacccctttgatgagggctaatgggattagaaccatgaactcttaggatcagaaggaagctaacggataagtcagtttaacacttactaaagcctagctgagataatacatagaaaagacttttaaagtttatgttatttacctgttctttaagacacttaagttctggcctgccatcaaattatacctcatcactagaccatatttttctagctcttctacaaaataagtcagccttcactgagtgtcatttaaaacttttgccttaacaagaaattctttatattaattgtgtttcttaatcttctataaggctctttatagcatttattgcttcccataaaaatattcctttgaggcaataatattagaatctagtgtcaggagaaaagaacattttaaattatataacttctttaaagtactcatcaactcttttatgataaaacatttctagtatatgaaaatatctgagctgctaatcgaatagtagtaagtatatatattcagagtttatttgattgctgtttggttaaataacacgttaaagcatattgtagacaatggaaatctagaatgaagtttttagtaatagaattagttctaaagactgaaatttcttcttgtaagaagtcagatttatgccttaactaccctccaactcaattagaaattgaaagattaatttatgacctactttaaaaaaatttatcttagtaataaaatagaaattgagatagtattataatacccttatcatttgctatccataagtgaaagctaagtggtctaaatttatagagaagatccatctttatcagaagcaggagtaacactattttctctaggagcaatggttttacaaagacaactcttaaaatttaatgaaatatgcagaggaaaccagaatttttatttcttacttcttttttggccacattactctcttggcacactggtatgcctgaaatgtttaatctgctccactttcttgtcccatttcattgatttgcacatacgcctcctttcctggattctcagaagtattttttaccccagtaaaaaatggttctcattttcatggaattttccatttcttaattgtttatccttttaaagttttatgtccactcaatacaaatgctcagcataagggttgaatggcaaaaataatttaccttaattcttaagacatgttttaggaaaagataaattatttctaaaccatttgtggggccagctcacagtttacagagctaccaccttgaaagatatggctggaatcaagccttaaaacatgtttccttttctttttaaacaacaagggaatttcagtcatttctctttgaaacttctactgtagtaatactctataaattctattttattttgacagataaccaagaaattaatttctaatttcttttttttccctagaactgttactaaactgagtcagaagtttaccaaagttaattttactgaaatccagaaactagtcctggatgtggcccatgtacatgagcactgttgcagaggagatgtgctggattgtctgcaggatggggtgaagagtcttgcttcttaaaatagaagattttcactcccttttctttctttttgtctcattctaaaagggagaaggttgtttgacttgaattggttacagagtatgtaaactaggtgactccttaaatttgcagaattctcggtagtaaaacttaaaccatcttttgttgatcctggctttcactttagctatacccctttttgtgaaaccaaggctcatctatttcttacttctaaaaaaaccgtgggaacttctcagaaggcttctccatagttacttggaggacgggaggaaactaaggtttaatgtatttattttttcattcatttattctttcatttgacaaataaatatatattaaatactttctatctgctagccactatgacagacacttgttttaaaagcacaggctgacctcaaggaattcacagtctgataggagagataagacagtgacctccttggagttagggactgccttggtttactgttatctccatagcacaatgcctggcacatggaaggcattctataatagtttgttaaatgaacgaatgcaataaaaattgcacaagtaactgtcctaccaggtaaaaagctagccttgccaaagacaagtgtgaataaagtggtctcggagaattagaaaacaaaatttaaaaaacccagcaacagtttcttgagtgtgctctagtcagtggtggtttaagcagtgtggcattggcttattttggctaaccctagacttcctagattttacaagagaggactgttgaccctcagattactctgtctctgtgggctccatgacataccaaagagattaaaatccaaggagcttaaaaattactgctcttaggtactcaaatggcttgataaccagcactggactatggtttccagaaggctgaaagtgaagataaaatgctcatttcagcccatccgatggcaattcagtgagatgcttgaagtaagcaagaagccaaggctgcagaggaggcctgagagtgacagtccctgaggagctggggaagaagtgggaggaggcagcctggcaggcgactgtactactttacttgtttttcttctaaaaatatggcatactaggaaaaccaacaagaagtattttgtttttctttgagctcagttttcccattttgaacggacaattttactgtttctcgttgtcatttttaaaaagttaattttttcaatttttggagctcataaccacccttttcctttaaagtggaaacattaatttcagcatgatatgtaagttggattttgatagctgaataatgggttctaattatctttgctgagaatgtacagaattttcagtcccatgacaggtatatatgtaagctctgcctctctctggccacttaggtgcattgccattttattatctatagactgccctctgaaggtcatagtcagtcactgcagtatgttctgataaagatgattatcattcttacggaatttctcgtggagcagaaagtttgctctccatgttatgataaagatgattatcattcttacggaatttctcgtggagcagaaagtttgctctccatgttatgataccagttgcaagtgttgtttaggggcaaatttgaatgctaatagaaatacatatagcaacatgcatcctattttatttgagcacatttccctcttatttgtaaaggttttcaattaaaataacataggatttagcttacaactatggaaagaagaattgaacaaacaggtaagtggaaaggaatgagaaaaggcaaaagtggggagaaagcactaaaacgggagacaagttaaaatttctttttaattgataggtcacgttctcactctatttgcctttaagggaagaaagcaatcaagttaatatgttttccttcattgtatagtatgtaactacggacactattagaggagggatttgtgtagcacttaggacattatacttgataatttccaagggtctttctagatttaaaagtctgattctaacgtagtaataaaaataaaggcccaattttctctttaatattggctgaagatattactctattattgcattaaaattaaacattcacacattgtttgcactgctaaataaaattatgtaatttcttcttctttccttcctccttcctccatccctctctatttccctttccccttccttctttcctggccttttttccttctttctttgttcccttctccctccctcccctttcttcctttttctaaagctggctttgagatcctttattaaagaataaatctttaaaacttatactttattttctctgttgcaggaaaaaatcatgtcctacatatgttctcaacaagacactctgtcaaacaaaataacagaatgctgcaaactgaccacgctggaacgtggtcaatgtataattcatgcagaaaatgatgaaaaacctgaaggtctatctccaaatctaaacaggtttttaggagatagagattttaaccaattttcttcaggggaaaaaaatatcttcttggcaaggtaacacactctgtaaatgcatgttcatgcaagtaaaaatgattatgtggctgacagatttgcgttgttgaaatggagagtgatgattatggtttttgagttcaatatgtgaggatatttggctagaatgttctgagccaaaatagatttcagtagataaccagggaataagtaatgggatttggtgtttaacggtgaagcgttcaccactgtgactcattaactgctttgcttatgaagctgaattttatttcacatcaatttctctggaatcagaagcattgtcatcctgtaaagattactcatatcaaggccaccattgaactctcaaataggatatggatatttttgtaataagaagagttcatgattaagaatgaactcttgctacgcatgttaaaaaaaaaacttttctccaaaagataacacaagagataatgctaggtagaagaacttttataggaacagcttattggctatgtattaaatacatgttttgtattttttaagaaaatcaaaacatgtttagagacatttgcagtacagtagtttgttttaatacaactgataggtcacgttctcactctatttgcctttaagggaagaaagcaatcaagttaatacgttttccttcattgtatagtatgtaactatggacactattagaggagggatttgtgtagcacttaggacattatacttgataatttccaagggtctttctagatttaaaagtctgattctaacgtagtaataaaaataaaggcccaattttctctttaatattgcctgaagatattactctattattgcattaaaattaaacattcacacattgtttgcactgctaaataaaattatgtaagctagaataaagttcagatttaggagacacatagtgacaactgattggtgacagaactaatcctataatctgggaatacggttagtaaagtcaagaattacctttaagtttacacatccatgcacatctaaatctaattgtttaatagaagcagttcttcagttgcaaaggttctttgcagtagaattttctcagccaggaatgatcttcccccagatatttgcatggcttctttcacttagctgatctctgttctgatatcagctgcctagagagaattttcttgaccacattcaaagttagtggcctctccaccttgggtatcatccttttttctctttttcatctttatttattttcattgatttatcgctaactgaaatgagatggcctatttcttgtttatttgttctgcctccctataatgtgtgcttttcagagggcaggtatttatcttagacatcattgagtccgttctgcttaaagcaatgctagcaaagagtggacactggaaaaatatttgttgaataaatgaatataaagtccgtaattgaaaagtcaaattgagagatgcaggagaaaacaaaaagccattttacaggacaatttgaaggatcacagtctgtattaacagttttgccattcatataattcaaatcatatttgattttcaggtttatttatttgaatttaacttccacatgccatattatataggaataactggagaagtgatggctccttttgtctcttagttccaataacttgaaatatttttctccacatatttcagttttgttcatgaatattcaagaagacatcctcagcttgctgtctcagtaattctaagagttgctaaaggataccaggagttattggagaagtgtttccagactgaaaaccctcttgaatgccaagataaaggagtaagttgctctagaattttaggggagtatgaaaaactggattgatatcatctgttaaaaatgctgtttgtttgaaagcctctagttttcaactagttgttagccagttatatctatttgtctagatattaagctgttattaactagcagtcagcagctagtggcttgctttagaaacaaaaatgttaattgcttctcagccttttggctaagatcaagtgtagaaataaaaatgttaaccaaaagtcctttgatccacaaataaaggtagtattcattattcatttttggataacttcagaaaggcaagaatttggtacagaaagaactgtaaccatttatccaaagattgagttttgccattaaatgattttgtgatttataaaatgttaaacttaatctccccaaaatccattttctgtaattatcaaaatttacactttaccatatttaatatttaaacatctctgattggttttataatagtatataatattgatcaattttatatacaaagttatgcatccaagaaaagaaaaatgtatatgtaataattcttcattttcaggaagaagaattacagaaatacatccaggagagccaagcattggcaaagcgaagctgcggcctcttccagaaactaggagaatattacttacaaaatgcgtatgtttttgtaaacagtatttttagtgaattaaaattattaaagagaatgtagccttccccattctcctcctttggaagcaacaagaatgacctgtgaggtctgatctgtggtattgactttaagttccccatactgtgcaaatttttgcagtaaagatatccattctgtcatagtctgtccgagttaaagcaccaaaagatcacagttaaaatcaatgaagctccgaggttgagaatacaagtcaggcttcctcctggagtttgctttttcattgtgatatgcttctataataggagtacagggagtggttgttagagtaaatgcatctcaaaagttggttcaaataccatgtagatgaaacaaacgagctgacctcatgtcttctggcatgagagtagagagtctgtgagaagaagcaaggcggctaaaaactcatgaatgactcagcaggacttagttaaaaaatgcttctttcaggtttctcgttgcttacacaaagaaagccccccagctgacctcgtcggagctgatggccatcaccagaaaaatggcagccacagcagccacttgttgccaactcagtgaggacaaactattggcctgtggcgagggagcggtgagtgtctgcttggtttggtcccatctcatttctgccctgtttgacttgaaatagcctcataattcccctctagggaagacggtaaaaaccaatgtagagatggccttaggaggcttgtttgattagtcacggttggaggggtgtgagaacccagctctggatggctggcatgtggccatgcttcctattcctccagggtggctggtggaagttcagccagtttagtcaacaatatctgagccaactttatatatcggaaagacagaacgaccaacatgtaactcataattcataacaattcataattcataacttcaaatcataatttctgctttttgttcatatacttactttgatgttttaaaaaagctttatctttgattgattaaaattagtcatgctattttagccatatttatattttcaccttttgtaacatgatattattattatgacatcaggaataattggttccctttcgcagggtatagggtacagcacaggataagtattatgttctgaatagtaaaatgactttcgagtcagtaatgccaatattctttacttcctaatgtcactagtatcatacataagattacaggatgaattaaaaatatttttcctataaagtcataattgcaaacaaaattgtctattttatcctttttcctctttttcataatggggagttatttgctgttagtcttcatgtcatacattttttccccaaaggttaagagtaaaaggagagttcttgtgattaaatgtcacctcaattgtttgttgaatttcccatgctgggaggctgcagggatgcaggatggtgtaatggttcaggagtgtatgttccggaggccaccagccaacaaccgcattctactttcactattctttagttgtatcacagtgggaaagcaacttatgtcattaagcttgagttttttcatctgacatttgagaatacaaattataccaccctcatacgacagctgttttaaacaagataatctgcataactcacacagcactagtctgacagataaagtgcacacaaaacatattatttcttattacaagttattactaggtgattaagaaatatctcctaagtaggcaaggtagcaagattctacattaggaaagtcttaaaaacccacaaaattgctcttacttcttttcaattaggatgatatattagctgcaagtgtatacatgtgtatatgtatgtgaataaaaggggtaagtttgtgctattcttaccttcagatagtgattatcaaaagaaaaatggaaagttcaactaaatacacatgggaaacataaaggcagagacatttttgtcctttagaagtgtgtatgtaactggaagcatgtttcaaatagctgacacaaatagctaaatgactatcctcaacatcacatatggaccatctgctactacttgctaaggcttagcccaaacaaatgggtaaatcctggaatttacaatataatgtcacatgatcctacatagcaaattttcctgtaatattaattataaattgctgggcattagaaattattgcagcagttttctgaaaaactgaaccaactttgtgactaatgcccaatctccttacttttttttctcattctcctaaccaggctgacattattatcggacacttatgtatcagacatgaaatgactccagtaaaccctggtgttggccagtgctgcacttcttcatatgccaacaggaggccatgcttcagcagcttggtggtggatgaaacatatgtccctcctgcattctctgatgacaagttcattttccataaggatctgtgccaagctcagggtgtagcgctgcaaacaatgaagcaagagtaagaaactgttacttgctagcatggaaaagaatgacaaccccaaagagtaactgagacttctacctcgctcacctaacactattgggctcactaacagagcgttactcccaaaacacttaaaatgcctttgaaaatagttttgtctcagtgtcttcacagtctcattggggaagcaggtctagaaaaattgacgagggtggacaatttcctgtttgtaaaaataatctctgttgtaactgttattgtgatatgtatttgggggttgaggaaaagtgggcaatctattctgaggaattagagtgtatctttgcagcaaatttgggtacttccattccaagcacaggaaacacatcattgaatctttttttacactatttacactttgaagagaataaccatcttatttaattcaaccatgcagtttgggtgttaagaaatgacatgtacatttcagttcattgtgggagctcttttgtaatggtgatggtcatgcaagtcaatggagcttatgttcttcaaactcccatgcattttaatcctcacttgttttgtaaatagtcttccttcattggaaaacccattcttctcttttttcctctatcacagtctgaggtatgtttcacagtatgataagaatgttgcctgttctggcaagctttttctattgctctggtctactttctattgctctggtctaagtccaacatgaaaggcttgctaagtgagcagtgcaggcaattagtgctgccagtgcccagataaggggtgtgataactggatgggcaggattcggagatctgggtctttgagtgtagataagacacagttaagaagagcggacaggaaaggatattcctgggggatgaggggagattgccttccactacacataagtatggtcaagtatgaaatagtgttttatccacaacctgcacaactccaggctggtggaacacttggcatgctttcagcctcaatctttctactgaaagtactagacaaggtgtgtgtggtcagtctggtgataggttgatggagtaagggtttaggctctgaaaattctctactaggaaggctgtagaaaaatagcattgcataacagacttctcttgtattttgttttgttttaaatcacaggtttctcattaaccttgtgaagcaaaagccacaaataacagaggaacaacttgaggctgtcattgcagatttctcaggcctgttggagaaatgctgccaaggccaggaacaggaagtctgctttgctgaagaggtacatgcagctcatttcatactcaaaatacttgctatggaattttctgtagtggataatgaaaggaagaccctacaaatttataactttaaaatattttcagagagatttaaatttcattgagaagcagattgagggattctataagatttaaaaaataatcacattttcttgcttaatattaggaaaatttataatattaaaatatattaatagaattagtaattttaatttatttcctagtagagaaacccataaagtgaatgtgtaaataattgacggtaatttagatagtttctggcctaaaattgatcaattcagctaaatggattaaaggatttaatagcaaattaattgtgcaaacagagtattaggagtctatttgtagaaaatgtttttgaactcatttagaagcttgcttttgtacatcaacagagtagtatttaggagttattttaattacatagtaattttagctggataattagccagattttctttaaccaggggattctacctaacatttaaaaaaattaccttttttcagctttattgaggcatgattgacaaatacaaattatatatgtttagggtgaacatgtgatgtttcaatatatttatacattgtgaaatgattatcacaatcaagataattggctaaattttacaaatctttagtttgtattgctacatatatttgaatatagcaacactatactttaaaaagatattctataacttagcgtttttgtcaattttacctttctcaccatgtaaaatccaaagacagatatatttagaaatgtagagtttttctataaataatataattagatgcatttgagtgtgtgcacttaccagtatatgtgtgtgtttttggtgggatcaggtagggtgggacatagataaccaaattagataaaactggtgaaacagatttgatgtgaagcatttctgaaaaacatgacacaagaagattaatgttctctaatctgagaagacatttatttagatatagagaacatgaacaaatagtagcagtgctttatctgcaaaccttttaatttctaataacttgtaatttgtagaggaaggggaaagattgagaatacgcattgatttggagattgttatagaagaaaactgttgatgtgaaagaatattgttttctccctggcttttactatcccaggttgttggcatcagagatgtgtttcttcatttttaacttagttaatctacaaacctatgaattcaccccggattgtagagtgttaactgtatgattggtataataatccatttctttatctgattatgtttattcttaattttcagggacaaaaactgatttcaaaaactcgtgctgctttgggagtttaaattacttcaggtaacaaaacattcagacaagcctgaatacaatgttgtttctccagaaatatcaatccataatgagatagatcatgaggagtgccattaattctcttaaaaatacatggaattcaaaaaaaagtttattttaaaaacacttgaacaaaattacgcacacaatgttaaattagtggctcaactatgcaaaatcctttttggttatttaaaagacttcaacaaatgctatcagaagactttcctacgtatccaatatttctctgatataaaataatagaaccagttacttactgcacctattagtttaattagtatttaatatatttttgctcatattgcaggggaagagaagacaaaacgagtctttcattcggtgtgaacttttctctttaattttaactgatttaacactttttgtgaattaatgaaatgataaagacttttatgtgagatttccttatcacagaaataaaatatctccaaatgtttccttttc

SEQ ID NO: 88 - DNA, 18194 bp, Mus musculus
  source 1..18194: mol_type = genomic DNA; note = Mus musculus strain C57BL/6J
ggacttcagcaggactgctcgaaacatcccacttccagcactgcctgcggtgaaggaaccagcagccatgaagtggatcacacccgcttccctcatcctcctgctacatttcgctgcgtccaaagcattgcacgaaaatgagtttgggataggtaagatgctttgtgacttgggagctattttcctataacaaaattcttaaaaattcccatatttgcatctccaggtatcttttttttttttttttttttttttttttgagacagggtttctctgtgtagccctggctgtcctggagctcactttgtagaccaggctggcctcgaactcagaaatccgcctgcctctgcctcccgagtgctgggattaaaggtgtgcgccaccacacccggctctccaggtatcttgacttaagcattctatatactgttgaagaccaggtatagatctaagtggtagatagatttagatgtaatgtaattttatgtaagaggcttataaaataacagcagtgttcaacacaatcaattttggatgtgttccatgctcaatttttttttgatattaattatttagtagggtctcatgtctagttccttcgggttgacagaaataacattttcactctcaatctttttaaaagtgctaattgttcgactctctggaaagcctaatgtgaacaggccgactgtagcataattatgtccaaagctactaaatgaagccattttgaatattatactgtgagggagccaagtagtaaggggacctgaaagatgagtattagtactaagtctgcaactgatcattctggttaactttgttccttaatttttcagtgtccccaagtgtaaaattaagatgtctggacaggtggttcctaacaacttggcagttctaagacttcatggcttgggtttaaattccacaacgattgctttcccggttaaaatcctcacttgtccaagtctgttttcctttcagcttccacgttagattcctcccagtgcgtgacggagaagaatgtgcttagcatgtaagtttcgcttccatcaatgtgctgcagaaatggcgtgcagagataagtctaggcaaccgaatgtgaggtttgaaattacaggagcaaattgggcagctttaaggctttgcttgtgctgaatatcacactgataagcaacatgtttaacttcggtcaacgctttagatcttagccttgacattgactggagttccagaaagcaagccaaatcagattttcaaaactgaagaattaatttctctgcagctttgtatgggctcaggagcgtgtcttgtcagaaccaataggaagatattgcgatatcctctattttgtaagctctttaatatcaagtcataggaagtaaaatattcttagtttagttattgtggagaatattttattcctttaaatattgtctctgttctacttctttgacatttatagtaaggaatttaaacgtgtgtcactggtaatgtctgcatgtagaaagctggacacggatcactttgagtcaatcggacactagtgcaatctaggattggggctcagtcacgctgggagcaaatataactgaaggtccagtgaccttcatctttgcttaaattaagtaagaaaaatagtgtgaaaaatgtgggccttcccaggtatagatgctcagtgagcagtgaccccaaaagaggaagtatatttgggggaaatctatttattttgacttttaagacttgcacctgtatttatgggtgaagatgacagaaagaaggctagcatttccctctgagtgactcgaacccagtttcccgtagatctttagcaaagggctccttctaaacagatcagagcagaggaagctgtacttgaaaggcacgcgtgactgggtctcagcctcaagccgctctgcatgtggtctccttgcagagctaccatcacctttacccagtttgttccggaagccaccgaggaggaagtgaacaaaatgactagcgatgtgttggctgcaatgaagaaaaactctggcgatgggtgtttagaaagccaggtgagtgattagagagaaagccacattgacacttaaccaaaatttaggctgcagaaagatgtcaggaagttgtgggtttaattatctgaaaactgttttctggaagtagggttcgattagttctggaatcccgccgaacagcactgttgaagcagagcaagcggctgcttaaaggagctgagattaatacgagactcagagctaaggctccggagtaacgctatctgagcaaccacaaacacattctcttctttgagcttccatacctgcaattatggagtgacattagatccactcagagctgtcacggaggtttatgttgatgacgagtggcagtatattgcctcttatgcagacattgtggctgacagcattctagggatcactgcaaacacactgataatcaaaacgctgcatggaaggtgacacccgcagaaaatctgtccagtcaactaagagaaattggctgcagcgtatcatcagaattcctatcttatttataaatgttaatttattaaattataatatttatattttatacatatattacagtttacatactatgttatattatatatggagacatagtacatattatattgtatattatatattacatattatattatatatgaacaatccatatttgtcatgtagttataattttatatagtgttatatcacattatacaataataatttaattaattgacagattaattaaatctctatgataatcctggaaagttgaggacaattttctcatggaggaaacttaggaacagggaaatcactcctttggagaattatagtttggtagacctgaggattaaatgaagtcttctggctccagaattaggtccttagcaaggtgctcacactgttcagaacagcacggtgagtgtgaggcctgcagcaggttattcgagttgctggatatagcacgtacgcagacaggaacatcagtgtctgatatccaagtaagtcagaacttgagaaaaacaagcacgtttacacacccagttgccctggtatagaaacaaaatagctaccattctgtagtttactcctgtatggaaatgtgctttatacttgttggagggatttaagtatggaatacatacagcagagcatgggcacagggccttccgacggtgcatatgccaagggccgcaccctaaagaaagccactctttaccttccagcagccagcaactgcccgtcactcctcggcaaggacccagggtttgtgagcccttctccatccacacaggcgttttgtgtacaattgccttgttatgtatgaaaagtttttgcttcaatcttcctgcagtctctggcccttaaaatcctttctcccttcttctccaatggaccctgattcttgaggggagagagagagcctttcctttctgtagacatcccatttggggctgagcacatcatggctacttatcctctgtattttggccagttttgaacctctgcatccattaccatcccctgcaaatagagcctcctgggatgaagactggggctgcacaaagttctgccactctgtgtttagaaggcactctagtattatgcccattcagtaaaacaaatagagataggttcactcttagggcctataccatactcagccatgggttcttggcccagcttgcagtgccaggcctgagtgccaccctgtcagagagtactgtttgtcactctcaggaatctatgtcactgttgtatcaatggctataccttagccaggctgactgtagctcttagggtttacagctggggtaaccccgtagatgacatcacatgacttttctccccctagcggtttgcacatgcccttctggaattatgaaatctagccagtaagaaggcaacctcagacgcttctggctctagaatttatgggttaataagaatctccggtttgtatgttagtttcagtcactctttgttagtcagttaaaaaggcgtgtataaattatgcccaaagcacttcttattgcgcctttcgtattcagttagtgttcagggtaatgttgcaaatggggtggctcgtcactacaagttcaaaaggtttcttttaaaaggttgactgattctgtagccagaagatggcctagtcggccatcattgggaagacaggccccttggttttgcaaactttatagcctcagtacaggggaccgccagggccaagaagtgggagtgtgtgggtaggggagtgggggggggagggtatggggaacttttgggatagcatttgaaatgtaaatgaagaaaatacctaattttaaaaaagacaataataaaacaaacaaacaaacaaaacccaaccaaccaaccaaataaaaaaaggttgcgtgaaacaaacatggcggtgcaccactatggtctcagggcttgggaggctgaggtaagtggatctgagtttggggcgagtcttgtttccatcgtgagtttcaggctagccgtgacttcatcaggaagaaaccctatctcatcctcgtagagaatatcacaaaccaaaaatgaatatagagaatgagtcttcagtaagcctgttgtaatagttaaataaagcgattcctaaggtgggtgacttccttcaaaatactggtcctgtccaaatctcagtgaatttaggtgctaaggaagaaagcattttaaaataccgtagctaaatctgtaattatgactaatgaagggtggttctatatttgaagttcctcttatttttaactaaaaataatattcatttattttactattgtcatgttgttagaaggccaaaaggaatgtgtatctataaaacaatgattatataaaaagaggaaaatttctattatcttggggccaaacttttcatgaaataaaagagtgaaattcacttaacctaaaacaagataggaaagataaatcagtgcataacctttttacttttaaaataattatatctcccacacagaatgtgtgctaccaacagatataagtttaaagcccttcaccctaaaagctaccaaagaaactcctcccatcagactgagaggaaatacactgaacgcgtatggggatctgtcctaatttactggtctcattttggacactaggaacctttacacactagttcccgtggagttagatagtcgcctttcattaacaataaaagattttcttttctcagctatctgtgtttctggatgaaatttgtcatgagacggaactctctaacaagtatggactctcaggctgctgcagccaaagtggagtggaaagacatcagtgtctgctggcacgcaagaagactgctccggcctctgtcccacccttccagtttccagaacctgccgagagttgcaaagcacatgaagaaaacagggcagtgttcatgaacaggtaaggaccatccttgggcatccagtgggcagccagtgtttctgcagtccacatgtgcactccaaagtgtatacaagtagggaatatagccagagtatgtctgctgaggtctgtgcaggggcttttgttagacacacactgtgagatgcagaacacaccgcatgcagactcagcctctgatccgtcagcctccggaaacatagctctttctcacctttaatgttttgatttttgctatgcacaaaagtgcatcaggatcgcaaagaatgactcctgagagccaagtgttcatgtacacccacgaaactgataattaagaccatgcagtcagcttctgggataaatgtgcttgtcacaaatgcttgcgggctttgatatcaccctctacccttcctttcacctttaaaatagttcattttatttttgaaacaaggtcctagaggaccaggttggtcttgaactaagtatgcattaagggtgggtttgagcttcttatcctcctgtctctaccttacaggtgccaaggggacaggcatatacatacatgcatacatacaacatatatttacatgtctatctgtctatactgatagacatactgagagacagagacagagaggacaccttagggtagtcatcgaactcttcactgataaagatttgagctgtcttacgtagaagctagcctggctgattccctgatatgtctgacaggcttactgaaaaagacatctcagaaggaatcatagcgtcattgtttgttttcataaaagactctggattaacggattggatcttttttttctcctgaggctgacatgtaggaacgttttgacagcttttgaaaaaagcctgcacattttcccgtaacagcacagtagagaaaaagtccattggaccctgttgcctttgtggttggttaccccattcattaaataaattccagagcttagttcagggaggtggcagtcccttcatctgttacatgtttgcaaatctccaagtgttgtccattccacaggttcatctatgaagtgtcaaggaggaaccccttcatgtatgccccagccattctgtccttggctgctcagtacgacaaggtcgttctggcatgctgcaaagctgacaacaaggaggagtgcttccagacaaaggtggtatctttgtgaagctatctgaagctaaatggggtttagccatggcttgggaaaacagaattaaaggcagaaatgtgcctcctgtgggaaataccatcttctttctcatcctagatgaaagtcatttttacttgatcttttcaattatcgatgaaatttcattttctatttatagttagaaacaatactccataatagtaaggtataactttaggccgaagtaaaaatgtatttggatcagcatttactgaatctttaaagagagcagagataacagcaatgcatgtacccagaggaggtgatttagtgcttataagcccattagagtgataggattgtccctctctccttcagagcagaaaacaatgttgatacagagtaaccagcctttcggtaattgacaagtggaaaacatactacaagttcaaccagagccaaggaagctggaaattagtggggttgctaatgtgtccgcaaaatggagcatattccccacttctggcttgttttattttgccttttgaggcagactcttgttatatagccccaactgggcccaaactcctaagaattatgacggtagtgcaattctttttttttttttttcttgtcttttcctttctttttaactgagcaggagccaacaggctttaccccacctggagactggacaggtgcagctgtccatgtggtcccagtatcaaaatgatgacgtattggtttgaagatgtttaagagatctcaggcatgcatacataagaattaatctaaaagtcatgaaaatagaatgacatgcctaaacgtcctgagctctaagtttagtagaagctattttatactttcctgtgtcatctgtactgagcgtttctagttcttagatctgaagagagaatgaatgggttttctaaacacctcacttcttctgcatctagagagcatccattgcaaaggaattaagagaaggaagcatgttaaatgagcatgtatgttcagtgataagaaaatttggatcccgaaacctccaggcaacgtaagtataagcgtctaaggaggcaatgtgatgtgctcaatgtcaatgtcactcctccagagtaaagcctcctttgggaggcagactctgattagaatcatgagatctaaggatcagaacagaactagcagatcagcctgctatttatgaaagtctcactggcatggtattcaaggaagagtttttaagtaagtttttattgtttgttctagacacttcagtttctgtccacactcaaattatactgccccattagaccatatttccccagctcttctacaaagtagatcaagctttatggagaggcatctccgacttgcagcctaataagaaatccttcttgttaaccaggcttcccaatcaaccccattgtgtcaattgttgtttctcggtaaaatattcccctgaggcaacaactttagaagtcagtgacaggtgggcagaggtccttagtgcctggaagcctaggtattgtgcacagccaagatccaatgcacatttcagccctgtagtttcttccaaagactggtttcacctttcttctggaagaggtcagacttatgctacaattacctcccaattctattagaaacttagtcatcaattcatatggcgccttaaatatttgtcttaatagtaaaatagaaatgggaggacacaatgacagcaatggcatcatgtatctgttagcaagaaaagccacacacgccacaatgattcccaagttatcagtaacaaagactcaatcctttattcaaggaagcagggtctttgcacaggcacctcttcccatgaattctggcagctttgttttatacttccttctgctgtggtctgatgccttgaagcagaatctggtagttcaggctggacttgagctcccgattctcctgcctccacttctggtttgctggaattgtagccgagtgcttctgtgtctgcaacaaacgctcaggatcagggctcaacaagaaagggcgacatttagcttgagttcctagaaagtcttcaggaagctacaaatgacttccaaattacttgagcacccagtcccccagtctacagagcttgtgcctggtggagcagaagctgacgagacctaagatgtgtttccgtctcttttaaaagaacacatttctgttctttcccgctggaggtaactccccagatcctctacagacaatgcgatttcatcctgataaacaagataatttttttttaaatgatcctcttccagaaccattattaagctaagtcaaaagttaactgaagcaaattttactgagattcagaagctggccctggatgtggctcacatccacgaggagtgttgccaaggaaactcgctggagtgtctgcaggatggggtaggagtctccctctctccctttttgtctcaattaatgtttcactatgcctggcttggctggggtgcagtgaacttacagactttcgaagagtaaaatttgagctacgtcatgattgctttggggtctcacctcaggcattagcaatatctgatccctttcatgagactacgagacattcagttcttatttgactgagagactgagtctctcccactagctagctagctgctggtttacagtgagggccacttgccgggaaaacttataaactgacatcaaagaatgtatagtttaactggagagataaaacaattggccttcttgaagttatagactgtcttttgtttaccattgtctctacagggcaatgtgtggcacattgaagggttctgtcatagtttaatgacagacttataagtaaaaataatgcaagaaactgttgcaagagagaaaatgtctatttattactaagcagaggtataaataaagggatctaaaagaattaaattcctttatttaacagattatataagaactggtgatatagatgatgtggctaatttgggttaactctgagctttctagatattgaatgagaggcctgtatataccaaattactcctcctttcatccctgtgacaccaaggactaccttttttttttttttttaaatctctcttgttaaaggctcaaatgatgttggaaaaagggacagaaaagactcacttcaatatactcagtgtcattcgttctttgtagaggtagtcagggaagtcagcaggtgacagggctcccagggggcagactggatcctccaggacagatggcacccctgctgtgaggagtggtgaatcctgaagcacggacttgattactttttccctcatgcacattaggaattcatcagccccttaggagtactggcaaaaaacgattttgtttttctttgaggtcagttttcttggtttgtaattgacaattttattgattttatttttctagttaaaaaaatagcttttaacttttggagcttgtcgctattttttcattgagagtggaaaaataatttcagtgctttacaggaaggctttaacaactgaataatagctttcaagggtcactgtaagaatgcacatccctgagcagagacaacgtggtgtacaggattttgcacagccagttcgtcttctagagtgccctctggcgggcagagtgggtcactgcagatccctctgatcaagatggaaggaagggaaagctagcaaggttagaatgtcagaggtgaatattgcacattggaacgtttcaataacagtaaaaagctgctgtcttgtttaaacaacacatttccttctcatcttgaagacgtttactaaaatagaaggcaggacttagatgaaagctgtgcgaagaggactcgaacaagtcggaaagcaatgaggaagagcaaaaatgagcaaaataaaaagggaaagataggtaaaaacagaagagtgatgaggcgagatatctcattgaccctgatcctccttttcatctcgccattgatttcttctcccacttcctttccgggctctaagttcctaccttagaggataaacctttgagatttatattacatattattatattgtattatattatatattatattatttactttacccattgcaggaaaaagtcatgacatatatatgttctcaacaaaatattctgtcaagcaaaatagcagagtgctgcaaattacccatgatccaactaggcttctgcataattcacgcagagaatggcgtcaaacctgaaggcttatctctaaatccaagccagtttttgggagacagaaattttgcccaattttcttcagaggaaaaaatcatgttcatggcaaggtaacatgccctgtaaatgtatatttgcaatgataaagaccatgaagtgatggggggtgggggctatagttttttagctcaactgaggctggctgtctagatgccgtgacacccaggagatgtaagcatagaacttgtagctaggaatgagatctactgtaacgtgatgaagttcccacaattaccactattaattggctggcttatgaatctatattttgttttatgccattctgtttcaatatctcatatgaaaaccaccacgaactttcaaagataatttgtatattttgtaataaggagggcataggctgccaagttggctcagtcagtgggtaagcaccacacaaactcgactacctaagttcaactcaaggaaactgatgtggagtgattgagccaatttctaaaagtggtccttgacaacacgtgcgtgctgtggcaaacatgccccctctagtagtaatagataaataaaattaaatttaaaaataagaagtgctcaagctcatgaatataatgatacacactataatacacacttcagaaaaaaataaacattcccctaaatatagctcaatagatagtgccagataacagttctttcactgaaacagattgcttgatatgtatagaatttttaagaaatgaaaacctgtttagagacatttgtacaaaagaagttttctgtactatagtcagcaggcatgtattcattctattggcctttaagggaagccaacagtcaagttaacaccttcccctttcttggatgtttctatgcactctattagaagagagatttgtgcagctcttaggacctcatgcctaatgggttccgagggcttttcctaagctaagcgcctgatgctaatgcagcaatcaaagtaatggctcaatcttctcgccagtattcccaaaagctgtggctctttggctgcactaaaatcaggtattcacatgtcatttgtactgctaaataaagttaggcaaactaaaacaaagactagatttaggaggaacatctaggtgttttgttggtggtagaagtcaagactacctacatctacaaacttagagcacaattcatcttaaagagtgatctctacacttacatatgcatacacatataaaagagctaacagttggcttcatagcaacaggccttcagtggagagaatgtttgcaggagacattttctcagctgagaacaggcttccaccaagcctgtatccccctctgttactcacaagtctgctgccctagccctcagtcaaaggagctgttcttgaccgcaagctgaattagtgtcccttcgtctttgggtgtcgcctcttttcctgccctcgtctttcttatttttcttcattgatttatcactatcaaagagagatgacccatttaagcttgcgtctgtctccttaagagaggggaggggaggtcttttctcttacatggcattagctcttcactgtttaaagcataccgtacactctgaaagcatatttgttggataaatgaatggaaatcttgccactgaaaagccatagcgagacacaaaacaaaggggtatatttgtattgttcttctttaattaaaaataatttcacatgcatgcatgcatacataagtttatacctaggttctgtatatgagagaaaacatgcagtttgtctgagcctggcttattcacttaatgacttccagttccatgtattttctggcaaatgtcatgatttcaggaaaggacattttactgggtgatttgagggactgccttaatagttttgctgttcacagaattcaaattatgtttgcttttctgcttcacttactgtttgacttttaatgtctgtatgctctgactgctatataggaatgcttagggagttagttaatagtgtaacgttgtcttagttctaacaacatgatatttttcctacatatttaagctttcttcatgaatactcaagaactcaccccaaccttcctgtctcagtcattctaagaattgctaaaacgtaccaggaaatattggagaagtgttcccagtctggaaatctacctggatgtcaggacaatctggtaggtggtactagaatttgggggataatctgtaaactgcattgatagtagtctttggaaatacagtttgtaggccagtgagtgagaaggctcagtaggtaaaggcgcctgttgtgcgagcctggggacctgagccggatccttgggtaccatgtaaagggagaagaaaaagaactgcactccacagagttggagtaggacccacacatgccctttggcagtgctccccactggataatgaaaaaaaattaaacatactagttaagtagtaattagctagttatacttagctagttataaactagtagtctcaaaattaatgagttatcctaactagcaaccaatggcttatgtaagaaataaaaatgttagttaaaagcattatggtgaatagaatagagatgctattcacctttgccagcttcaggaaggcaaaatctcctgtccagtggctatatcctcaagagttcatttgttttcattcttaaaagtcacgcattatcatcttcaatatttcataaaggcttctaagattggttttataatataataagatcctggcatatagaaaattgtgtgtctgagacgaaagaataatgcatgtaataatgtcggtatttttaggaagaagaattgcagaaacacatcgaggagagccaggcactgtccaagcaaagctgcgctctctaccagaccttaggagactacaaattacaaaatctgtatgttttttttgaaatgttttcagtaaattaaaattattaataggtgaaggaagcataaatttaaagtctcaaggcaccaggcactgctactctttcttctattcccaattggatcaaagtcagtataaatgtgactacgtgatttctccaaagttatcccccattaaatattaacaagaacagcccatgaagtctgatgttttaaattgacttcgggttccccaaaccctgtagatttttgcagaagagctatccattctgctcttgatctgtcaaggttccaacacccaaagtacacggttgaaatcaaggaagagctaaggttgggaggaaagcagtcttcttcccacgtagtgacacgtgagagagatggaggtggggtatgtggagtgattggcagaataaacacttctcattgtggggccacatgactcatgccttctgacaccggaagtaggtcctagagaaggaggaaggggtgaacactcacgatgacgaggtaaaaatgtttcttcaaggttccttattggttacacgaggaaagcccctcagctgacctcagcagagctgatcgacctcaccgggaagatggtgagcattgcctccacgtgctgccagctcagcgaggagaaatggtccggctgtggtgagggaatggtgagtggagaactgtgtggaggtggtgttccttggtttcttcagtaagttcaggtggagggtgtgtgggagacctgtctctcagtggtttgcctttggccaggcgttctgtccttctcaaatggttaggggcaaacacagagggattattcaacaatgtaaaggcaaactttatacataggaagaataacacccaacatattatccaacttattgcttcttattctctaaattctcactcttatattggaaagtaaaagaaaaaaaaaagaaaaattcacttctaagagattgcaattagtcatcttattttagccacacttaagagttctgcattttgcagaccagtcgaatcattatagtgctatttggggtagtttgttcccaagcaaagtacaggagtaagattcgtgctctggatagtcacccccttaatcttcacgtcacactgagaggggagcttctgccactaagcttgaactgtttgcatttgacatttgagaataaaaaaaaaaataccaatttgtagagtgacttgtcttagattagggaatccaaggatgcacccagtcatagctcgagagtcgtaagctcacaagcaccacaacaatcattaagatttataacttggtgtttataacttggttatctttgaagtatgggggattgggaggatctatatgaaaaggatctatatgaaagctttaagcacacacacatttattttctactagttttgtgtgtgtgtatacgtgtatatatagaaagttgcaaaggtagattttccctattctagctttcagaaaggagttctctgtatcaaaatgcaaatgcaggggttgaagggatggcttaggcagttaaaagaatgtcctgctcttgttgaggaccggagtttggaccttcgcacccactgaaaatgtctctcaaacacctattactccagttccatagagaggtgatgtctctggcttccacaggtacccaactctcatctgtacataccagcccctagttatacataatttaaaataacatagatatttaaacaaaagcaaaactcaaccagatacacacagaaaatgagctcaaaaaattgatttctactcataaagatggaaatggtttttcccttttgaaagtctgtctacaatcagaagcatatttcaaaaagctaaaggtcttttcacaacaccacatctgccaacatctatcattacacactaagttttatcccaagcaaatgggtaaacagcacagtccttaacaaatcgttactaaggtgatagtacagcatagaaaagtttcccgtagcattagtgataagctcctagactttgggagccaccgcatgaaatttctgaaaacgtgagccaacttcggtggctaattttgtctgcctgcttccttctttttcattctttttaaccaggccgacattttcattggacatttgtgtataaggaatgaagcaagccctgtgaactctggtatcagccactgctgcaactcttcgtattccaacaggaggctatgcatcaccagttttctgagggatgaaacctatgcccctcccccattctctgaggataaattcatcttccacaaggatctgtgccaagctcagggcaaagccctacagaccatgaaacaagagtaagacattgttattttgagctgagactcctgccttacatgttgagaacttctgggttcagtagaacattgctgcccttgaaatactcaacactatctttaaaattagttctgtttcagtttttacacagccttatgtgggaagttagtttgaaaaaaatccacggaggcagacaattttctggttatgaaaaattctctctgtcataacaattgcaatatatttgtgagtaggaggaaaatggacaatatatttagaaaaattagaaaagatctttgtagtgagtcaggatacttctaatgataggaaatgagtgattgcatctataagcagtataattatacctgactcaactatgttgttgttttaaaaaaaggaaataaacacacattcgcgaggggagacattctgtaatggtaatggggtgaagccaggggaacttatattcttaaatatccatgtattttaatttaaatgaaatgctcactggctttgtacatgagcttcctgcattgggagatctattctcccagttttcttcaccccaggcagaggcgagtttcaagagataataagaatggtacttcctttcccaagcttgcttatggccttgccaaatttaaacccaacacatgatcaccgatcaccgctaagagagtattacaggcagccagtgctccttcggttaagctatgatgctggcgggtgtcagcatcttgacatctgggcttgtgggtatgcctaaccgcactgcagaggagccaagaggcaaggataatgtaggtaatcaagacagagagcacagttccctctccataaaggcacacagagtcctgacatagtgattcctctgtaacctgcaccagggcaggccagcggcgtggtgtgcttcaggctgagaagtgtaagggctaaccttggcacggagcggaaggagaggcagctgaggatggctgctagggttctgaaaacgctctactaaacgttctgggaaggtgcggctttctttgcatggcagactcgcctgtattttcttttgttctaaaccccaggcttctcattaacctggtgaagcaaaagcctgaactgacagaggagcagctggcggctgtcactgcagatttctcgggccttttggagaagtgctgcaaagcccaggaccaggaagtctgtttcacagaagaggtgtgtatgaacatctcattccctaaagtctcggtgtggtgcatcctgcagtaaagaacagaaatacggtcctacaaatccgaaacttaaaataatgaccaatttatttatttatttatttgaaaatcttatggggtttaaaaactaatatttttctaagtactagagagaattaaaaatttattctatattaagagaatcagtaatttttatttatttcctaataggataattaaatatataaggaattaatggtaacatagactgtttctgagctaaagttaattgattttcatgaagtggattaaaggaattcactagttagtgtgtattgattaaatgatcaagatatttgaagaatatttgtaggaaatactcctgacctcacttaagagcgagcacactgacagtggggataagaaaatgtctgagttgctgtctgactggcacagtcctctgtctctttatctcagcatctgtgtatgttcttcacttccagggtccaaagttgatttccaaaactcgtgatgctttgggcgtttaaacatctccaggtaagaaaaaaatgcagcccaggctcaaatgttgattctctcgatcaatcaatatagtgatgattctaagaagtatcatcaatattccttaaaatgaatataatgtaataaagaagaaggtttatttttaagtcactaaaaattttggggagatttaagaagcttcagaaaatgccatcagaaggttttctacttaattagtaatataaactattttctttttatattgcagaaggaagagtggacaaaaaaatgtgttgactctttggtgtgagccttttggcttaactgtaactgctagtactttaaccacatggtgaagatgtccatgtgagatttctataccttaggaataaaaacttttcaactatttctcttctcctagtctgctttttttttattaaaaaatacttttttccattt

SEQ ID NO: 89 - DNA, 17377 bp, Pan troglodytes
  source 1..17377: mol_type = genomic DNA
aacctgcataaggattgctttgagtcaatccatgagcactgtagtcttgggttttagaccttgatcctactgggaatagacactgttagaggtctgtctaattaccaatttttttttgcttaaatttaaaagtaaccataaagaatatagatatcctcaattatgggtacattacagtagatggatggtcacagaaggagaaaccacgcttatgggaaatccacttattttagcctttaacatctatatgtatatttatggcaaaagaaaacaagaaaaagactaaagtttcttctcggatgacctggaagctaattttacataattttacaaatcaaatgtctaaacagattacaatataaatagaaaacaaagcaaacaaatgaaaaactatacttgagaaaaataagcttgctacaggtctgttccttaaggattcacacgtatttttgtttcagggctaccatattttttgcccagtttgttcaagaagccacttacaaggaagtaagcaaaatggtgaaagatgcattgactgcaattgagaaacccactggagatgaacagtctgcagggtgtttagaaaaccaggtgagtgaataattttaaaaaagcattgtgatatttgacaaaaatttagcatgctgaagagaagatacaaaaatagcagtgaaaaatgcatttaaatatttgaagagctattgtatgaaagagggattagattcattctgaattgctaaagagggcagaagagaacaataggtagttattataaagagaccatataaatatgatgactaagagctaaggttctgaaataagattatcttgatgactatgggcatattaacttttttgagcttcagttttcttatctataaaataagggatgataatagctcccatttcatagttagcatggaaattgatataacagcaatagtagctaacttttattatacacacaatgtgactggcattattctagggagcataatgtgtatattgataataaaaatattttatgacataggggatagatagcactgatgaatcagaatggttgtccagtgagtcaagagatgctggctggggcttctgggcaggatatcaactttgcttacctatatttatttattaaacatttaaaataatccttgaagatatatgctaatcttccaattgaggaagctgaggctcagagaatttaagtaactttcttaagggaaccaccaaatggcagagccaggatttgaactagagcatctggcttaaaattgacagtcttagtagcttcattacactataaccatagtgcatgtaagatgcatagcacatcgttagggttgccaggtttagcaaacaacaacaaaacataatacccagttcaatctgaattttagataaacactaaacacttttcttagtataaggatatttcattgtagatgctcaacaaataatatttattatttattttatctcaacatagaaacaaacttgataatgattagaactctccaattacaaaacaacatgcccagagaatactctgttacggtggggttaattaggtggctgaaagacaatgtacctggaatatcatagaagagatgctcctttaaggatatagtttaagttctttccaactttgaaatttatgaattgacaaaaatttctgttttgcatctctatttttgtcttgttctgataatcttttcaaaatgtgtataaaaaccaagaatacattatctattgcaaattaacaaccaattagacgttcaaggtaatgttacagatcgctgatttattcttgtaaattcaaaggtatgtcttttaaatgaggattgggaattagaaatcttatgtaagctttccaggattctctaaatattactgtagcagctataaaagctacataaaagttccctcagatacatgaaacacatgtattcctcggatgctttctgtggaatattgatgctgtcatctgagtttggtaagagtaagtcacagaggaggaaacacatatattttaaaacattttagctaaatatgtaattgtggccaagaaaagtgtttttttaaaaaagaattatttcatttcaaaatcatttttatttataattgaaaataatgtgcagttttttattgtcttgtaaggatggcatgtaaaatgagcatttatgtctgaaatgtggtatgtctgtgtgtgtgtgtgtatatatatatatgtatgtatataccataatatatacatatgtatttgcaattccaaaagttacatctttaatgagaatcatgaaaatattattttgctcagtttctttttttatttaaatttaaatttaaagttctggtgtacacgggcaggatgagcaggtttgttacataggtaaatacgtggcatggttggttgcttcacctaccaacctgttgcctgggtattaagcccagcgtgcattacctatttttcctaatgctctccctccctgcactccactccctgacaggccccagtgtgtgctgtttccctccctgtgtccatgaaacatggtttatatatttataaaagtttatatatcctagtccaaatttttgataacacaaaaaggaaaaataaaataattcaaaattgggaaagagaaacaaaagattgcatggcttttttccttttattgtttggacattaaagtctcattttccataaggcagcaaagaaatctatttcatcgggctgaaacaaaatacattagaatttgtatggaaaatttttcagaatctatagttctgatcttaaacattagaaaatgtttcatgtgtcttatagatttttaaagcaaagttagttgtctttcaccaaacataaaatatttcttatagctacctgcctttctggaagaactttgccgtgagaaagaaattttggagaagtacggacattcagactgctgcagccaaagtgaagagggaagacataactgttttcttgcacacaaaaagcccactccagcatccatcccacttttccaagttccagaacctgtcacaagctgtgaagcatatgaagaagacagggagacattcatgaacaagtaaggatccagtttaaaggtagatgcaaacctcagaaacacagcaatggcaagcctaatttagtatttttgcaatgtactcatgtactcccagtaagaggtataatgtttctttggtgttgtgtctgctgaggtcccaggcaaggtaattaggagagcaacattcaatgtaacttggtttccatagcacgctagatgtagtacaaaccacaggacaaacctaccagaggttccattagtcccttgagagatatacaccttttttttttctttttacccattctactctcaattttaccttgttcaagaatatattagtattgcaccaaattgatgctttccagagccatatattggtgttttgtgttcacctaattgcctagaaataaaagttagagatccaagcatggtcaagcatggtcaagatacacagacatggcaaaggtttactgaacacttacttaggatgttgtggaaacatgtctgcttgcacagaggatcagattaacactcacaaacaaactttgaagcctccttctcctcttcctcttcattcttcttctttcccccattttgttgataggaaattgaaggttggaaggctaaaacaactggctaagggcacacagctagtacatttgaccccaggttctctgttggagaagcctgtatgtaactcttcagcacttctgccttccatgttacttcctaaaccaggttaatagagagattgcccttagaacatctctgctatggcgactatccaggtgcataaccccattctgcactgacaagggataaaatgtccatctttctgttgcacttagcagaagtctggctttgctaatccctgaaacatatctgagtaggcttattgaaaaggaccttttaataagaatcatggttagcatgtctgcctattttcttctcataatagaatccggtaccatctctcagatatttttccccccaggatctttagtgaggaaaattttgacaacatgtggaaaaaatatgatgattttccccttaggaacacagtaaagacagagtcaaatgcattttgttgttgttgttatttgaatctttaaataaatcccagtgtccagttccaagcagtagtagtcctatttttaggtgtttataaatcttctagctctattttatttcacagattcatttatgagatagcaagaaggcatcccttcctgtatgcacctacaattcttctttgggctgctcgctatgacaaaataattccatcttgctgcaaagctgaaaatgcagttgaatgcttccaaacaaaggtatcatatttgcgtggatatctgaaccagtactgtagtctatgactcattaaaacaaaacaaagttaaaaatgaaaacgtgcttaattgtggagagtatcgtttttggaatagagaaatagctcagcagtctgatattcttcgagtgaacaaaactggatttgctggtttttattatctattcattaagtcaacaataattttattattaaggaagtgagtttgatgggataaagaaggaaagacagacagaaagagagaaagagagggtgctataaatgggaaggagtaagtgaaagaaaacggagaaaaggaggagcagaggagagagaaaaaatgaagaactatgataaatgctttatactcactgtttttttaaaccttagaacaaatttgaggtgtaagtatttttgtcctttaacaaactaggaaagaggtttagagaagaaatttttttttaggtttagagaggtagaataatatccaccattaactacttgctaccagcagtcctataacaaaaatttcctaagaactgactactctcagtgtcaagccgtgatacaattgtattttttgtaactgagaagacatttaagaaactagcaggcttcaatttgtctttaagctgtttaaaagtacagttgttcatttatgatccccagtataaaagttatgtttttgtttcaaggtactttgagtaaatttatctggcatagatgcatataaactaacccaaaagaataaatgagtcaataatattctgcgataatgtatgacatttataatttttagtaaaaaacatattttatggaatttcattttacctatacttgttgttttcctaaatattagagcttgtaaagaaaatgttagtatatgctttcatgacattttgtttcctctacatctaggcagcaacagttacaaaagaattaagagaaagcagcttgttaaatcaacatgcatgtgcagtaatgaaaaattttgggacccgaactttccaagccatgtaagttcaagctctatctagggaaggcggtgagagctacagaactaccattttgcaatttgggttcgttgttttaattgttgctgttttagagaatgaagacccctttgtgacctctttgatgagggctaatgggattacaaccatgaactcttaggatcagaaggaagctaacggataagtcagtttaacacttaccaaagcctagctgagataatacatagaaaagacttttaaagtttatgttatttacctgttctttaagacacttaagttctggtctgccatcaaattatacctcatcactagaccatatttttctagctcttctacaaaataagtcagccttcactgagtgtcatttaaaacttttgccttaacaagaaattctttatattaattgtgtttcttaatcttctgtaaggctctttatagcatttattgcttcccataaaaatattcctttgaggcaataatattagaatctagtgtcaggagaaaagaacattttaaattatataacttatttaaagtactcatcaactcttttatgataaaacatttctagtatatgaaaatatctgagctgctaatcgaatagtagtaagtatatatattcagagtttatttgattgctgtttggttaaataacacgttaaagcatactgtagacaatggaaatctagaatgaagtttttagtaatggaattagttctaaaggctgaaatttcttcttgtaagaagtcagatttatgccttaactaccctccaactcagttagaaattgaaagattaatttatgacctacttttaaaaaatttatcttagtaataaaatagaaattgagatagtattataatacccttatcatttgctatccataagtgaaagctaagtggtctaaatttatagagaagatccatctttatcagaagcaggagtaacactattttctctaggagcaatggttttacaaagacaactcttaaaatttaatgaagtatgcagaggaaaccagaatttttatttcttacttcttttttggccacattactctcttggcacactggtatgcctgaaatgtttaatctgctccactttcttgtcccatttcattgatttgcacatacgcctcctttcctggattctcagaagtattttttaccccagtaaaaaatggttctcattttcatggaattttccatttcttaattgtttatccttttaaagttttatgtccactcaatacaaatgctcagcatcagggttgaatggcaaaaataatttaccttaattcttaagacatgttttgggaaaagataaattatttctaaaccatttgtggggccagctcacagtttacagagctaccaccttgaaagttacggctggaatcaagccttaaaacatgtttccttttctttttaaacaacaagggaatttcagtcatttctctttgaaacttctactgtagtaatactctataaattctattttattttgacagataaccaagaaattaatttctaatttcttttttttccctagaactgttactaaactgagtcagaagtttaccaaagttaattttactgaaatccagaaactagtcctggacgtggcccatgtacatgagcactgttgcagaggagatgtgctggattgtctgcaggatggggtgaagagtcttgcttcttaaaaaagatgattttcactcccttttctttctttttgtctcattctaaaagggagaaggttgtttgacttgaattggttacagagtatgtaaactaggtgattccttaaatttgcagaattctcgatagcaaaacttaaaccatcttttgttgatcctggctttcactttagctatacccctttttgtgaaacaaaggcccatctatttcttacttctaaaaaaaccatgggaacttctcagaaggcttctccatagttacttggaggacgggaggaaactaagttttaatgtatttattttttcattcatttattctttcatttgacaaataaatatatattaaatactttctatctgctagccactatgacagacacttgttgtaaaagcacaggctgacctcgaggaattcacagtctgataggagagataagacagtgacctccttggagttagggactgccttggtttactgttatctccatagcacaatgcctggcacatggaaggcattctataatagtttgttaaatgaacgaatacaataaaaatagcagaagtaactgtcctaccaggtaaaaagctagccatgccaaagacaagtgtgaataaagtggtctcggagaattagaaaacaaaatttaaaaaacccagcaacagtttcttgagtgtgctctagtcagtggtgacttaagcagtgtggcattggcttattttagctaaccctagacttcctagattttacaagagaggactgttgaccctcagattactctgtctctgtgggccccatgacacaccaaagagattaaaatccaaggagcttaaaaattactgctcttaggtactcaaatggcttgataaccagcacgggactatggtttccagaaggctgaaagtgaagataaaatgctcatttcagcccactccgatggcaattcagtgagatgcttgaagtaagcaagaagccgaggctgcaggggaggcctgagagtgacagtccctgaggagctggggaagaagtgggaggaggcagcctggcaggcgactgtactactttacttgtttttcttctagaagtatcgcatcctgggaaaaccaacaagaagtattttgtttttctttgagctcagttttcccattttgaacggacaattttactgtttctcgttgtcattttaaaaaagttagttttttcaatttttggagctcataaccacccttttcctttaaagtggaaacattaatttcagcatgatatgtaagttggattttgatagctgaataatgggttctaattatctttgctgagaatgtacagaattttcagtcccatgacaggtatatatgtaagctctgcctctctctggccacttaggtgcattgccattttattatctatagactgccctctgaaggtcatagtcagtcactgcagtatgttctgatgatgattatcattcttacggaatttctcatggagcagaaagtttgctctccatgttatgataccagttgcaagtgttgtttaggggcaaatttgaatgctaatagaaatatatatagcaacatgcatcctattttatttgagcacatttccctcttatttgtaaaggttttcaattaaaataacatagggtttagcttacaactatggaaagaagaaatgaacaaacaggtaagtggaaaggaatgagaaaaggcaaaagtggggagaaggcactaaaacgggagacaagttaaaatgtcttctttcttcttctttccttcctccttcccccatccctctctacttccctttccccttccttctttcctggccttttttctttctttctttgttcccttctccctccctcccctttcttcctttttctaaagctggctttgagatcctttattaaagaataaatctttaaaacttatactttattttccctgttgcaggaaaaaattatgtcctacatatgttctcaacaagacactctgtcaaacaaaataacagaatgctgcaaactgaccacgctggaacgtggtcaatgtataattcatgcagaaaatgatgaaaaacctgaaggtctatctccaaatctaaacaggtttttaggagatagagattttaaccaattttcttcaggggaaaaaaatatcttcttggcaaggtaacacactctgtaaatgcacgtccatacaagtaaaaatggttatgtggctgacagatttgcgttgttgaaatggagagtgatgattatggtttttgagttcaatatgtgaggatatttggctagaatgttctgagccaaaatagatttcagtagataaccagggaataagtaatgggatttggtgtttaacggtgaagcgttcaccactgtgactcattaactgctttgcttatgaagctgaattttatttcacatcaatttctctggaatcagaagcattgtcatcctgtaaagattactcatatcaaggccaccattggactctcaaataggatatggatatttttgtaataagaagagttcatgattaagaatgaactcttgctacgcatgttaaaaaaaaaacttttctccaaaagataacacaatagataatgctagatagaagacctttcataggaacagcttattggctatgtattaaatacatgttttatattttttaagaaaatcaaaacatgtttagagacatttgcagtacagtagtttgttttaatacaattcataggtcacgttctcactctatttgcctttaagggaagaaagcaatcaagttaatacgttttccttcattgtatagtatgtaactatggacactattagaggagggatttgtgcagcacttaggacattatacttgataatttccaagggtctttctagatttaaaagtctgattctaacgtagtaataaaaataaaggcccaattttctctttaatattgcctgaagatattactctattattgcattaaaattaaacattcacacattgtttgcactgctaaataaaattatgtaagctagaataaagttcagatttaggagacacatagtgacaactgattggtgacagaactaatcctataatctgggaatacggttagtaaagtcaagaattacctttaagtttacacatccatgcacatctaaatctaattgtttaatagaagcagttcttcagttgcaaaggttctttgcagtagaattttctcagccaggaatgatcttcccccagatacttgcatggcttctttcactcagctgatctctgttctgatatcagctgcctagagagaattttcttgaccacacacaaagttagtggtctctccaccttgggtatcatccttttttctctttttcatctttatttattttcattgatttattgctaactgaaatgagatggcctatttcttgtttatttgttctgcctccctataatgtgtgcttttcagagggcaggtatttatcttacacatcattgagtccgttctgcttaaagcaatgctagcaaagagtaaacactggaaaaatatttgttgaataaatgaatataaagtccgtaattgaaaagtcaaattgagagatgcaggagaaaacaaaaagccattttacaggacaatttgaaggatcacagtctgtattaacagttttgccattcatataattcaaatcatatttgattttcaggtttatttatttgaatttaacttccacatgccatattatataggaataactggagaagtgatggctccttttgtctcttagttccaataacttgaaatatttttctccacatatttcagttttgttcatgaatattcaagaagacatcctcagcttgctgtctcagtaattctaagagttgctaaaggataccaggagttattggagaagtgtttccagactgaaaaccctcttgaatgccaagataaaggagtaagttgctctagaattttaggggagtatgaaaaactagattgatatcatctgttaaaaatgctgtttgtttgaaagcctctagttgttaactagttgttagctagttatatatattaactggttgtctagatattacgctgttattaactagcagccagcagctagtggcttgctttagaaataaaaatgttaatcgcttctcagccttttggctaagatcaagtgtagaaataaaaatgttaaccaaaagttctttgatccacaaataaaggtagtattcattattcatttttggataacttcagaaaggcaagaatttggtacagaaagaactgtaaccatttatccaaagattgagttttgccattaaatgattttgtgattcataaagtgttaaacttaatctccccaaaatccattttctttaattatcaaaatttacactttaccatatttaatattaaaaaatctctgattggttttataatagtatataatattgatcaattttatatacaaagttatgcatccaagaaaagaaaaatgtatatgtaataattcttcattttcaggaagaagaattacagaaatacatccaggagagccaagcattggcaaagcgaagctgcggcctcttccagaaactaggagaatattacttacaaaatgcgtatgtttttgtaaacagtatttttagtgaattaaaattattaaagagaatgtagtcttccccattctcctcctttggaagcaacaagaatgacctgtgaggtctgatctgtggtattgactttaagttccccatactgtgcaaatttttgcagtaaagatatccattctgtcatagtctgtcctagttaaagcaccaaaagatcacagttaaaatcaatgaagctccgaggttgagaatacaagtcaggcttctgcctggagtttgctttttcattgtgatatgcttctataatagcagtacagggagtggttgttagagtaaatgcatctcaaaagttggttcaaataccatgtagatgaaacaaatgagctgacctcatgtcttctggcatgagagaagagagtctgtgagaagaagcaaggcggctaaaaactcatgaatgactcagcaggacttagttaaaaaatgcttctttcaggtttctcgttgcttacacaaagaaagccccccagctgacctcatcggagctgatggccatcaccagaaaaatggcagccacagcagccacttgttgccaactcagtgaggacaaactattggcctgtggcgagggagcggtgagtgtctgcttggtttagtcccatctcatttctgccctgtttgacttgaaatagcctcataattcccctctagggaagacggtaaaaaccaatgtagagatggccttaggaggcttgtttgattattcacggttggaggggtgtgagaacccagctctggatggctggcatgtggctatgcttcctattcctccagggtggctggtggaagtgcagccagtttagtcaacaacatctgagccaactttatatatcggaaagacagaatgaccaacatgtaactcataattcataacaattcataattcataacttcaaatcataatttctgctttttgttcacattcttactttgatgttttaaaaaagctttatctttgattgattaaaattagtcatgctattttagccatatttatattttcaccttttgtagtataatattattattatgacatcaggaataatttgttccctttctcagggtatagggtacagtgcaggataagtattatgttctgaatagtaaaatgactttcgagtcagtaatgccagtattctttacttcctaatgtcactagtatcatacataagattacaggatgaattaaaaatatttttccgataaagtcataattgcaaatgaaattgtctaactattttatcccttttcctctttttcataatggggagttatttgctgttagtcttcatgtcgtaaatttttcccccaaaggttaagagtaaagggagagttcttgtgattaaatgtcacctcaattgtttgttgaattccccatgctgggaggctgcagggatgcaggatggtgtaatggttcaggagtgtatgttccggaggccaccagccaacaaccgcattctactttcactattctttagttgtatcacagtgggagagcaacttatgtcattaagcttgagttttttcatctgacatttgagaatacaaattataccaccgtcatacgacagctgttttaaacaagataatctgcataactcacacagcactagtctgacagataaagtgcacacaaaacatattatttcttattacaagttattactaggtgattaagaaatatctcctaagtaggcaaggtagcaagattctacattaggaaagtcttaaaatcccacaaaattggttctacttcttttcaattaggatgatatattagctgcaagtgtatacatgtgtatatgtatgtgaataaaaggggtaagtttgtgctattcttaccttcagatagtgattatcaaaagaaaaatggaaagttcaactaaatacacatgggaaacataaaggcagagacatttttgtcctttagaagtgtgtatgtaactggaagcatgtttcaaatagctgacacaaatagctaaatgactatcctcaacatcacatatggaccatctgctactacatgctaaggcttagcccaaacaatgggtaaatcctggaatttacaatataatgtcacatgatcctacatagcaaattttcctgtaatattaattataaattgctgggcattagaaattattgcagcagttttctgaaaaactgaaccaactttgtgactaatgcccaatctccttacttttttttctcattctcctaaccaggctgacattattattggacacttatgtatcagacatgaaacgactccagtaaaccctggtgttggccagtgctgcacttcttcatatgccaacaggaggccatgcttcagcagcttggtggtggatgaaacatatgtccctcctgcattctctgatgacaagttcattttccataaggatctgtgccaagctcagggtgtagcgctgcaaacgatgaagcaagagtaagaaactgttacttgctagcatggaaaagaatgacaaccccaaagagtaactgagacttctacctcgctcacctaacactattggcctcactaacagagcgttactcccaaagcacttaaaatgcctttgaaaatagttttgtctcagtgtcttcacagtctcattggggaagcaggtctagaaaaattgacgagggtgggcaatttcctgtttgtaaaaataatctctgttgtaactgttattgtgatatgtatttgggggttgaggaaaagtgggcaatctattctgaggaattagagtgtatctttgcagcaaatttgggtacttccattccaagcaaaggaaacacatcactgaatctttttttacactatttacactttgaagagaataaccatcttatttaattcaaccatgcagtttgggtgttaagaaatgacatgtacatttcagttcattgtgggagctcttttgtaatggtgatggtcatgcaagtcaatggagcttatgttcttcaaactcccatgcattttaatcctcacttgttttgtaaatagtcttccttcattggaaaacccattcttctcttttttcctctatcacagtctgaggtatgtttcacggtatgataagaatgttgccccttctggcaagctttttctcttgctctggtctaagtccaacatgaaaggcttgctaaatgagcagtgcaggcaattagtgctgccagtgcccagataaggggtgtgataactggatgggcaggattcggagatctgggtctttgagtgtagataagacacagttaagaagagaggacaggaaaggatattcctgggggatggtgggagattgccttccactacacataagtatggtcaagtatgaaatagtgttttatccacaacctgcacaactccaggctggtggaacacttggcatgttttcagcctcagtctttctactgaaagtactagaaaaggtgtgtgtggtcagtctggtgataggttgatggagtaagggtttaggctctgtaaattctctactaggaaggctgtagaaaaatagcattgcataacagacttctcttgtattttgttttgttttaaatcacaggtttctcattaaccttgtgaagcaaaagccacaaataacagaggaacaacttgaggctgtcattgcagatttctcaggcctgttggagaaatgctgccaaggccaggaacaggaagtctgctttgctgaagaggtacacgcagctcatttcatactcaaaatacttactatggaattttctgtagtggataatgaaaggaagaccctacaaatttataactttaaaatattttcagagatatttaaatttcattgagaagcagattgaaggattctataagatttaaaaaataatcacattttcttacttaatattaggaagaattataatattaaaatatattaatagaattagtaattttaatttatttcctagtagagaaacccataaagtgaatgtataaataattgatggtaatttagatagtttctggcctaaaattgatcaattcagctaaatggattaaaggatttaatagcaaattaattatgcaaacagagtattaggagtctatttgtagaaaatgtttttgaactcatttagaagcttgcttttgtacatcaacagagtagtacttaggagttgttttaattacatagtaattttagctggataattagccagattttctttaaccaggggattctacctaacatttaaaaaaattaccttctttcagctttattgaggcatgattgacaaatacaaattatatatgtttagggtgaacatgtgatgtttcaatatatttatacattgtgaaatgattatcacaatcaagataattggctaaattttacaaatctttagtttgtattgctacatatatttcaatatagcaacactatactttaaaaagatattctataacttagcgtttttgtcaattttacctttctcaccatgtaaaatgcaaagacagatatatttagaaatgtagagattttctataaataatataattagatgcatttgagtgtgtgcacttaccagtatatatgtgtgtttttggtgggatcaggtagggtgggacatagataaccaaattagataaaactcgtgaaacagatttgatgtgaagcatttctgaaaaacatgacacaagaagattaatgttctctaatctgagaagacatttatttagatatagagaacataaacaaatagtagcagtgctttatctgcaaaccttttaatttctaataacttgtaatttgtagaggaaggggaaagattgagtgagaataggcattgatttggagattgttatagaagaaaactgttgatgtgaaagaatattgttttctccctggcttttactatcccaggttgttggcatcagagatgtgtttcttcatttttaacttagttaatctacaaacctatgaattcaccctggattgtagagtgttaactgtataattggtataataatccatttctttatctgattatgtttattcttaattttcagggacaaaaactgatttcaaaaactcgtgctgctttgggagtttaaattacttcaggtaacaaaacattcagacaagcctgaatacaatgttgtttctccagaaatatcaatccataatgagatagatcatgaggagtgccattaattctcttaaaagtacgtggaattttaaaaaaagtttattttaaaaacacttgaacaaaattatgcacacaatgttaaattagtggctcaactatgcaaaatcctttttggttatttaaaagacttcaacaaatgctatcagaagactttcctatgtatccaatatttctctgatataaaataatagaaccagttacttactgcacctattagtttaattagtatttaatatatttttgctcatattgcaggggaagagaagacaaaacgagtctttcattcggtgtgaacttttctctttaattttaactgatttaacactttctgtgaattaatgaaatgataaagacttttatgtgagatttccttatcacagaaataaaatatctccaaatgtttcctttt

SEQ ID NO: 90 - DNA, 8635 bp, Homo sapiens
  source 1..8635: mol_type = genomic DNA
gctactcccaccccgccccgccccgtcattgtccccgtcggtctcttttctcttccgtcctaaaagctctgcgagccgctcccttctcccggtgccccgcgtctgtccatcctcagtgggtcagacgagcaggatggagggctgcatgggggaggagtcgtttcagatgtgggagctcaatcggcgcctggaggcctacctggcccgggtcaaggcgctggaggagcagaatgagctgctcagcgcggagctcggggggctccgggcacaatccgcggacacctcctggcgggcgcatgccgacgacgagctggcggccctgcgggccctcgttgaccaacgctggcgggagaagcacgcggccgaggtggcgcgcgacaacctggctgaagagctggagggcgtggcaggccgatgccagcagctgcggctggcccgggagcggacgacggaggaggtagcccgcaaccggcgcgccgtcgaggcagagaaatgcgcccgggcctggctgagtagccaggtggcagagctggagcgcgagctagaggctctacgcgtggcgcacgaggaggagcgcgtcggcctgaacgcgcaggctgcctgtgccccccgctgccccgcgccgccccgcgggcctcccgcgccggccccggaggtagaggagctggcaaggcgactgggcgaggcgtggcgcggggcagtgcgcggctaccaggagcgcgtggcacacatggagacgtcgctgggccaggcccgcgagcggctgggccgggcggtgcagggtgcccgcgagggccgcctggagctgcagcagctccaggctgagcgcggaggcctcctggagcgcagggcagcgttggaacagaggttggagggccgctggcaggagcggctgcgggctactgaaaagttccaggtgaggaggttgagggcctgggtgagagaaagtcccagaaagctccagaaagtcccttatgaagctcagagaccttctgggaagggagtggggctagctggctgctgaatcaggagccagttctcagaaacctggtgccacaagtcctagacttttacagcccgtctagtgtaggatgcgaatggtggggcttctcgaagcacatcccgggtgggcagtcaggcccaagacccgttgcagcagccccgccactctctggatggcaccttctggctctgatgatgaccggggctccgggtcccttcccaggctctggtattactaggaggacacccagcactgtcgcctctgcgctgaatctggtggcctggccactcagaatcaccaagttcctcacagccctccttctcctgaggggaggagtgaggggccgtgaatgaatggctaccagccccctcccatgtcatggcttctcggctccctggagcacattccagaggcccataacagctgctccttctcacagggcacagatgtgaccagcagctgagaaaacagcttcttgcctgggccacacagaggtgccatggccacctccccatccctcctctcagaggagacagaatccagaacatgtgggaaatgggggtggggcgggggtgagagcctgctgtgaggagcaggagacagttgtgggagatgggaccaacgggggacgggggctgtttgccttccagtcctgcaggctccaggcatcttgattaatcgtttttccttctgctttcgcttttttttccccctcttctctctccataacccatctcgtctcctccctcacctccccttcctgtgggagctgtgttctgagcaacatgtgctaccatttaatcagcatcctcagaggaggagcaggccatgggagagagctgagagtgctgacaggggccctgggctcatcttggctgatccagagggggctctctgggcagggaatagggtaggggaggcgggggtctgctacacagataagtcagccagggagcaggaggtgcttcccgggcagcggcagcgggcaggaggcaggttggttcacagaagggaccccagcccctccactgactgcctctcgcctgccctgcagctggctgtggaggccctggagcaggagaaacagggcctacagagccagatcgctcaggtcctggaaggtcggcagcagctggcgcacctcaagatgtccctcagcctggaggtggccacgtacaggtacgagacgagccctgtccacccaggcacacagaggcacacacacatgctggggcagactacgtggctgaaggggaccagaggtgtaggtgatggcaactctgctgccactgggttctgtgactctaggctggtcacttccacaccggaacatgtcctgcctgaaaccgtctgctcccccataggctggagacctgagcaatgtcctgtgcccaggaaatccccccaggagagatgatattgccgagcgggacagcctctggagaggggctgggcccgtgtggggcaactgcatccagacccttcccccaaggggcaaagctccaactctatgtgtgcccgcacccagggggtcatgtcctttggcagccacggaaaggaggcattgcaggcatggggtggctgcactgacttgccacctgacctgggcctcagcctcgtctaggggctgagggctgggctgggggacttccaaggcctcttctagcctggatgtcatggggcgagactcctctgatgcccctagtgcccttggtcctgcccagcctttcattgtccacattttctgttatcctagaaatggctgagaccaaggaggggtggcttctcacttgctatgtggccttgggcaaagcccgcagtctcttctgggaaactggtcctgttggctgaggggccattgatggggcctgaggaaggggctctgtggctggtgaggggccacatgagatccaggaaaggaggagaggcaaggcccagagatggaaggtcagtgaggctctggggaggacgtggaggagaggggctccaccgccagggaagagaagcccagaaggaaggccgcagcactggcaaggacagaggtgaggctacagcgagtgctaaccagactcagagatcatggagcaaagcagagaggagcagctgctcatcctaagttattgaattgattggtccctgctcccctctttggttcaaggggcgctgaggaaggggcctggacacaaagacctctgtgccccgaagagcttgggatccagagtgcttagagatcctgagatgagggccctgacccccagtgaagccaccaaggggaagggtctggtgggccccgaggaatttaactgctattttttgaggcatgaaaaggatttggagagggggagctgaattcatttgcttttgtctgtcgctagctctgggggccaccggggaaggaggagggagcccatcccatgggaacggcctgagaattcccacttccccagaatcctctccttctcagaccctccagatggtggcttggacaatggcagcaattagcatgagaatcggtcccccacacagaggatgaggtcattggcctggggtgggaggaggaggctagcctaagccttgtgtgggtgtgtgtagggcaatgtccgactgtgtgggaatctgcttctatgtctgagctctgctgtgtatcccaaatacagtgtgactttgtgtgaccaagtgtgtgatgtctgtgggtatgtgactgtgtgatttcaccctgagtgtggcttttgtgtgacagtgtcaaatgaagaggaagcctgcagggcctggatggtgcaagctcagcctgagttgtccccagctggcttgctgcctgcaggcctgggggcagagggctgaccccactttccctctgtcctctccaggaccctcctggaggctgagaactcccggctgcaaacacctggcggtggctccaagacttccctcagctttcagggtaagaggaggggccaagttcccccagaaactaccctgctttgctcttcatacccagacctatctttcccgagaggcaccaatctaaatttcaagtccgtggcctccagtgtcagtgagcatgctctcagcccagccatgggcgccaggggcaggcgcatggatactcttgccagcggtggctgctctgtggctcccctcattgccagtgatatactgatgctgtttcttccccctctgcctttccagaccccaagctggagctgcaattccctaggaccccagagggccggcgtcttggatctttgctcccagtcctgagcccaacttccctcccctcacccttgcctgctacccttgagacacctgtgccagcctttcttaagaaccaagaattcctccaggcccgtacccctaccttggccagcacccccatcccccccacacctcaggcaccctctcctgctgtagatgcagagatcagagcccaggatgctcctctctctctgctccagacacagggtgggaggaaacaggctccagagcccctgcgggctgaagccagggtggccattcctgccagcgtcctgcctggaccagaggagcctgggggccagcggcaagaggccagtacaggccagtccccagaggaccatgcctccttggcaccacccctcagccctgaccactccagtttagaggctaaggatggagaatccggtgggtctagagtgttcagcatatgccgaggggaaggtgaagggcaaatctgggggttggtagagaaagaaacagccatagagggcaaagtggtaagcagcttgcagcaggaaatatgggaagaagaggatctaaacaggaaggaaatccaggactcccaggttcctttggaaaaagaaaccctgaagtctctgggagaggagattcaagagtcactgaagactctggaaaaccagagccatgagacactagaaagggagaatcaagaatgtccgaggtctttagaagaagacttagaaacactaaaaagtctagaaaaggaaaataaagagctattaaaggatgtggaggtagtgagacctctagaaaaagaggctgtaggccaacttaagcctacaggaaaagaggacacacagacattgcaatccctgcaaaaggagaatcaagaactaatgaaatctcttgaaggtaatctagagacatttttatttccaggaacggaaaatcaagaattagtaagttctctgcaagagaacttagagtcattgacagctctggaaaaggagaatcaagagccactgagatctccagaagtaggggatgaggaggcactgagacctctgacaaaggagaatcaggaacccctgaggtctcttgaagatgagaacaaagaggcctttagatctctagaaaaagagaaccaggagccactgaagactctagaagaagaggaccagagtattgtgagacctctagaaacagagaatcacaaatcactgaggtctttagaagaacaggaccaagagacattgagaactcttgaaaaagagactcaacagcgacggaggtctctaggggaacaggatcagatgacattaagacccccagaaaaagtggatctagaaccactgaagtctcttgaccaggagatagctagacctcttgaaaatgagaatcaagagttcttaaagtcactcaaagaagagagcgtagaggcagtaaaatctttagaaacagagatcctagaatcactgaagtctgcgggacaagagaacctggaaacactgaaatctccagaaactcaagcaccactgtggactccagaagaaataaatcagggggcaatgaatcctctagaaaaggaaattcaagaaccactggagtctgtggaagtgaaccaagagacattcagactcctggaagaggagaatcaggaatcattgagatctctgggagcatggaacctggagaatttgagatctccagaggaggtagacaaggaaagtcaaaggaatctggaagaggaagagaacctgggaaagggagagtaccaagagtcactgaggtctctggaggaggagggacaggagctgccgcagtctgcagatgtgcagaggtgggaagatacggtggagaaggaccaagaactggctcaggaaagccctcctgggatggctggagtggaaaatgaggatgaggcagagctgaatctgagggagcaggatggcttcactgggaaggaggaggtggtagagcagggagagctgaatgccacagaggaggtctggatcccaggcgaggggcacccagagagccctgagcccaaagagcagagaggcctggttgagggagccagtgtgaagggaggggctgagggcctccaggaccctgaagggcaatcacaacaggtgggggccccaggcctccaggctccccaggggctgccagaggcgatagagcccctggtggaagatgatgtggccccagggggtgaccaagcctccccagaggtcatgttggggtcagagcctgccatgggtgagtctgctgcgggagctgagccaggcccggggcagggggtgggagggctgggggacccaggccatctgaccagggaagaggtgatggaaccacccctggaagaggagagtttggaggcaaagagggttcagggcttggaagggcctagaaaggacctagaggaggcaggtggtctggggacagagttctccgagctgcctgggaagagcagagacccttgggagcctcccagggagggtagggaggagtcagaggctgaggcccccaggggagcagaggaggcgttccctgctgagaccctgggccacactggaagtgatgccccttcaccttggcctctggggtcagaggaagctgaggaggatgtaccaccagtgctggtctcccccagcccaacgtacaccccgatcctggaagatgcccctgggcctcagcctcaggctgaagggagtcaggaggctagctggggggtgcaggggagggctgaagccctggggaaagtagagagcgagcaggaggagttgggttctggggagatccccgagggcccccaggaggaaggggaggagagcagagaagagagcgaggaggatgagctcggggagacccttccagactccactcccctgggcttctacctcaggtcccccacctcccccaggtgggaccccactggagagcagaggccaccccctcaaggggagactggaaaggagggctgggatcctgctgtcctggcttccgagggccttgaggccccaccctcagaaaaggaggagggggaggagggagaagaggagtgtggccgtgactctgacctgtcagaagaatttgaggacctggggactgaggcaccttttcttcctggggtccctggggaggtggcagaacctctgggccaggtgccccagctgctactggatcctgcagcctgggatcgagatggggagtccgatgggtttgcagatgaggaagaaagtggggaggagggagaggaggatcaggaggaggggagggagccaggggctgggcggtgggggccagggtcttctgttggcagcctccaggccctgagtagctcccagagaggggaattcctggagtctgattctgtgagtgtcagtgtcccctgggatgacagcttgaggggtgcagtggctggtgcccccaagactgccctggaaacggagtcccaggacagtgctgagccttctggctcagaggaagagtctgaccctgtttccttggagagggaggacaaagtccctggccctctagagatccccagtgggatggaggatgcaggcccaggggcagacatcattggtgttaatggccagggtcccaacttggaggggaagtcacagcatgtgaatgggggagtgatgaacgggctggagcagtctgaggaagtggggcaaggaatgccgctagtctctgagggagaccgagggagcccctttcaggaggaggaggggagtgctctgaagacctcttgggcaggggctcctgttcacctgggccagggtcagttcctgaagttcactcagagggaaggagatagagagtcctggtcctcaggggaggactaggaaaagaccatctgcccggcactggggacttaggggtgcggggaggggaaggacgcctccaagcccgctccctgctcaggagcagcactcttaacttacgatctcttgacatatggtttctggctgagaggcctggcccgctaaggtgaaaaggggtgtggcaaaggagcctactccaagaatggaggctgtaggaatataacctcccaccctgcaaagggaatctcttgcctgctccatctcataggctaagtcagctgaatcccgatagtactaggtccccttccctccgcatcccgtcagctggaaaaggcctgtggcccagaggcttctccaaagggagggtgacatgctggcttttgtgcccaagctcaccagccctgcgccacctcactgcagtagtgcaccatctcactgcagtagcacgccctcctgggccgtctggcctgtggctaatggaggtgacggcactcccatgtgctgactccccccatccctgccacgctgtggccctgcctggctagtccctgcctgaataaagtaatgcctccgcttcaaa

SEQ ID NO: 91 - DNA, 9359 bp, Mus musculus
  source 1..9359: mol_type = genomic DNA; note = Mus musculus strain C57BL/6J
cgctgggtcactgtcgccgctactccctttctcccccttaaaagctccaagggccactcccttctctagtgctccacgtccgcttgccctcggggggccagaccagcgacatggagggttgcgtcggggaagaatcttttcagatgtgggagctcaatcgacgcctggaggcctacctgacccgggtcaagacgctggaggagcagaaccagctgctcagtgccgagcttgggggactccgggcgcagtccggggacgcctcctggcgagcccgagccgacgacgagctggcagccctgcgggtcctcgtcgatcagcgctggcgggagaagcacgaggctgaggtgcagcgcgacaaccttgccgaagagctggagagcgtggcgggccggtgccagcaggtgcggctcgcccgggagcggaccatcgaggaggcggcctgcagccggcgcgcgctcgaggcggagaagaatgcgcggggctggctgagcacccaggctgccgagctggagcgcgagttagaggctctgcgagcgtcgcacgaggaggagcgcgcgcacctgaacgcccaggccgcctgtacgccgcgccgaccccccgcgccggcccacgcatcccccatccgggcccctgaagtcgaggagctggccaggcgcctaggcgaagtgtggcgcggggcggtgcgtgactaccaggagcgcgtggctcacatggagagctcgctgggccaggcccgcgagcgtctgggccaagccgtgcggggcgctcgggagagtcgcttagaggtgcagcagctgcaggctgatcgcgacagcctccaggagcgcagagaggcgctggaacagagattggaaggccgctggcaggaccggctgcaggccactgaaaagttccaggtgaggagggtcaccaacacgcccaccctgtccctggtaaaaccaagccctaggaggtacttaggatggcaagagaccttcaggaaaggggtgggggcaaggacaactgtattcaggagtccttgctcagagcaagcacaagtcctagacttccctgtccagacaggcaggatggatggaattctgagacctcctagcacagcccccttgaaaggcccgcaggccaatacccactgtagctgctcctcactctttgaatggcaacccctctctagggtgactccctgtgcccttcactatgcagttgtcaatcagaaggtgcccaacacatgctctctccccaccagaaggttcctagcaaccatagtgaaggaaggcagtgtgagccaccgcagaccaccagcccctctctgtgtcaaggcttctcagctccctgaagcgcattccaaaggcctggggcaccctccccctcatattgcacagatgtgaccaacagctgagaaaacagcctcttgcctggcccagacagaagtcccgacgtgaccacctgcccactcttcttgggggagaaggattccagaacaagtgggaagtggaggaacccagcctgctatgaggagccgggggcagtggtggcccagctgctttccttccaagccttctcgaggcgactcttgataaattgctttttccttctgtttccactttgcctcctcttccgctgtgtaacccatctcctctcctttatcccatctcctcccgtgggagctaggttctcaatagcatgtgttaccatttaaccagcatcctaagaagaagcctggtctatctaggagaggcctggagtgtttcctgtgcttgtccgggggtccagcacagtgctccagacagggagaacgcaggtagaggaacaggactctgccctacaaagatgtgagcagtgaagagagtcatggcccagagcagaggcccctcccactcactctgccggcttgctttgcagctggctgtggaagccctggagcaggagaagcagggtctacagagtcagatcgctcagatcctggaaggtgggcagcaactggcacacctcaagatgtcccttagtctggaagtggctacatacaggtacacagtactgactgtctccttggctgaagggccccgaaacttgaccctgtaaaactgttctatttacgtgtatttgtgtataggccccatgtgtccaggtgtcttaagagcccagaagacactgggtcccttgcagctggagttataggctgtgagcagctccacactggtgctgtgagccacacccctgttctctgcaagggcagcaagcactcttaaccactgagccatctgtccagccctcagatccacttaaaactttttattacatgtatttatgtaatgtttttgtctgtgatggaggcttatgagtcccagagatcaaagaggttgtctggcttggcagcttggtaggcataaacttgagcccacctgctcccaggttcgggactagaagagatggttatgcttaaagagacaactcagtcttcagggaggagaccagagggtacagtcacctgctctcgagttctttgaaaggcaggcaatctccagtgtctatgccagatcccagggacacctgggcggtctcaggaaagagaccttgcaggattgcctggtcgtgctcaccggtcccctagcccgggcctcagctgtgtctggggtaagagctgggcgcctagccttctgccttcctttcaagccctcgtgtcactggccctgcccagctcctgttgcccctttcttggctgcctcaggaaggctgagtggaacagctgtgggtagtttgtgtccagcctctgtctgtcagaagaggtcccggctggagtcccactgttgagggctgaggatatcccgccagagtatggggccaggacaggatgtcgcccttctccagaatccactggcaaagaggcaagaccagagacagatctaggagaggagctggagggtagagtccagagaagggaagccagtgagtgtctaggaaggactgaatgcacaaggcaggacactatgaggacggaggaaaggctattttgagaaccagatgtgctcagaggccatgaatggaaacaagggactagctccgaatcccttgtgaactgattcccctcatctcctcccatcagctgtgaacctaaagacctctggcctgaaggaggatttgtgatcctaagatgagggccttcgccccagtcagtcttctgaggcgaggggaagggtccaggcagctctgaggaatgtaagcactggtgtttgcggtctgaaaaggatttggagaaggagagctgaattcatttgcttttgtctgtcaccagctctgggggcctaggagagagccatcccatgggaacagcctgagaattcccacttcccctgaggagcccctccttctcaggccctccagatggtagtgtggacaaaaggcaataattagcatgagaatcggcctccctctccgaggatgaggtcatcggccttggccttgggtggggaggcggagactgatctgaggagtctgatcgaagtgttagcaattcacttggccctgcttccgaatgtgggaatctgcgtgtggggtctccctgagtctcaaatatgggttcaccaagtatatatctgtgggtatatgactgtgtggctttcatacgacaatggtcacaataaagagtgatcctgcagtggcaggacatgcaacctcagctgggcctgaccccatcgcctcccctcccccccaggactctgctggaggctgagaactctcgcttgcagacacctggaagaagttcccaggcttctcttggctttcctggtaagaggcggagccaactgctcctggacgctctccttccacatcttccctaagcagcatcagtccaagtcttcactccctggtccccacagtactgatgtccccagtctaagcagtgggggtcggataaaatggctgaaatgagggctgctctgggtgaagtcaggacatacttacagtgtttcttttcttttttaagatttatttattttatgtatatgagtatactatagctgtacagatggttgtgaaccttcgtgtgattgttgggaattgaatttaggacctctgctggctccagtctgccctgctcgctcagtccctatgcactctggcccaaagatttatttattattataaataagtacactgttgctgtcttcagacatactagaagaaggcgtgagatctcattacgggtggttgtgagccaccatatggttgctgggatttgaactcaggaccttcggaagaacagtcagtgcccttacccgctgagccatctcgccagcccacttacagtgtttcttactctgcttttccagaccccaagctgaagctgcatttccttgggataccagaggaccagcacctgggatctgtgctccctgtcctcagcccaacatccttctcttcccccttgcctaatacccttgagactcctgtgacagcctttctgaagacacaggaattccttaaggccagaacccccaccttggccagcactcccatcccacctatgtctgaggctccctatcctaaaaatgcagaggtcagagcccaggatgtcccccattccctgctccagggtgggaggcaacaggctccagagcctctttgggctgaggccacagtgcccagttctactggtgtcctcccagagctggaggagcctgggggcgagcagccggaccacttccctgatgatccaacctccttagccccacccctcaaccctcaccactctattttagaggctaaagatagagaatccagtgagtctagagtttctagcatattccaggaagaagaagggcaaatctgggaacttgtaaagaaagaagcagccacagaggtaaaagtagaaaacagcttagcacaggaaatacaagaaagtggtctggacacagaagaaatccaggattcccagggacctttgcagatggaaaccctggaggctctaggagatgagccactgatgtctctgaaaacccagaaccatgagaccccaggaaaggagaattgcaattcatctatagaagagaactcggggacagtaaaaagcccagaaaaagaaaaacaaacaccactgaagtctttagaagaaaagaatgtagaggcagagaaaactctagaaaatggggttcttgaactatctaaacctttaggagaagaagaaccaagaatggaggatcaagaattaatgtctcctgaacacacactagagacagtttcatttctaggaaaggaaaatcaggaagtagtgaggtcttcagaagaacagaacttagaatcattgataacttttaaagaggagagccaatacccactgggaggtccagaagccgaggaccagatgcttgaaagactggtagagaaagaggatcagaggttcccaaggtctccagaagaagaccagcaggcgtttagacctctggagaaagagaatcaggagccactaagatttgaagaagcagaggaccaggtgcttgagagactgatagaaaaggaaaggcaggagtccctgaagtctccagaagaagaggaccagcaggcatttagacttctggagaaagagaatcaagaaccactaaggtttgaagacgcagaggaccaggtgcttgagagactgatagaaaaggaaagacaggagtccctgaagtctccagaagaagaggaccagcaggcatttagacttctggagaaagagaatcaagaaccactaaggtttgaagaagcagaggaccaggtgcttgagagactggtagaaaaggaaagtcaggagtccctgaagtctccagaagaggaggaccagaggactgggaagcctctagaaaaagaaaatcaggaatctctgaggtctcttgatgaaaaccaggagacaattgtactgctagaaagcaagaaccagaggccactgagatctctagaagtagaagaggaggagcagagaattgtgaaacctctagaaaaagtgagccaggtctccctcgaatctctcgaaaaagagaatgtgcagtcaccaaggtatctggaagaagatgaccacatgattaagagcctgctagaagacaagactcatgagatcctgggatctcttgaagatagaaatggggagaactttataccacctgaaaatgagacccagggttcattgaggcctccagaagaagaggaccagaggattgtgaaccatctagaaaaagaaagccaggagttcctgaggtctccagaagcagaggaagaagaagagcaggtgatggtgagatctctagaaggagagaaccacgacccactgagctctgtggtgaaagaggagcagatggctgagagcaagctagagaacgagagtcaggactccaggaagtctcttgaagatgagagccaggagacctttgggtctctggaaaaagagaatctagagtccctgaggtctctagcaggacaggaccaagaggaacagaaactcgaacaagagacccagcagccactgagggctgtagaagatgagcagatgacagtgaaccctccagaaaaggtggatccagagttaccaaagcctcttagaaatgaccaggaagtagtcagatctcttgacaaggagaatcaagagtcactagtgtcactgaatgaaggaggtatggagacagtgaagtcttcagaaacagagaacatagaatcactggagactgtgggagagtgcctgggaagaaggaagtctgtagatactcaagagccattgtggtctacggaagtgactagtgagacaatagaacctctagaagatgagacccaagaaccactggggtgtgtggatgagaaccaagaggtgctgacaccccttgaaagggagagtcaagaactgagatctctgggcaagtggaacccagagactgtggaatcaccaggaggggtggaggacagtcagcagtgcctggaagtggaagagggcccggagagggagcagcaccaagagtctctgaggtctctgggagaggtggaatgggagctgcctggatctggaagtcaacagaggtgggaggatgtggtggaggatggagaaggtcaggaagcatccctgggggctacaggagtggaaactgaggataaggcagagttgcatctgaggggccaaggtggggaggagaaagctgtagaggagggagagctgctgcaggatgctgtgggggaggcctggagtctggggagctcggagcccaaggagcagagggtccctgctgagcccctcgatgacctggagggacaaccagagcagacgggaaccctagaggtcccagttgctcagggaatgccagaggcaacagagcaagatgaggacagagcccaagcaggtgaacaagactccgtagaggtgacccttgggttagaggctgccagagctggactggaactcgagcaggaagtggtagggctagaggacccaaggcatttcgccagggaggaggccattcacccatccctgggggaggaaagtgtgaaggcaaagatagatcagggcttggaagagcctggaaaggaaccaaaagaggcaggtgctctggactcaggcatccctgaattacccaagactagcagtgagactctggaatgcaagggctgggaagagtctggggagggctggggagaagaggaggcctcgctggagacctcagaccatgagggcagccatgcccctcagcccaggccccctaagacagaggaagatgagggtctacaggcagcgctaacagtccctggtcccaagctcctggaaccctgttcacccatcccgatcttgacagatgcccatgagctgcagccccaagctgaggggatccaggaggctgggtggcagccggaagctgggactgaagcactgggaagagtagaagatgagccagagtttggtcgtggggagattcctgagggcctccaggattgggaggagggcagagaagacagtgaggcagatgagttaggggaaactctccctgactctactcccttgggcctctacctgaagtctcctgcctccccaaagtgggagcaagctggagaacagaggcttttccctcaaggggaggccaggaaggaaggctggagtcctgctgccctggctgcccagggtctcagtgacccaccagaggaagagcagcaaggccatgactctgacctctcatctgaggaatttgaggacctagggactgaggcctctcttcttccaggggttcccaaagaggtgtccgatcatctgggccaagagccccccgtactgcagcctgcatgctgggatcagggtggggagtctgatgggtttgctgatgaggaagagagtggggaagagggagaggaagaagatgctgatgaagaagaaggagcagagtcagggactcagtggtgggggccagggccctctggtggaggtgtcaaggtccaggatgtcacccagagaggggacctggaacatgaatctgtgggtgacagtggcctctgggatgatggcttgagtggggctgcagctaatgttcttgtaactgccctagagacggtgtctcaggacagtgctgagccttccgggtcagaggggtctgagtctgcttccttggagggggaggaaggtcaagcgattgaccatttagatgccccccaagaggtgactagcgtggtcccaggggcaggagacacctttgatatcagtggccagggccccaacctggagtcagagcaagtgaatgggaggatggagaatggactagagcaggctgagggtcaggtggttctgcatggggacgaggatcaaggcatccctttacaggaacagggtaccctcaaggcccctttagtagggtctcctgtgcatctaggcccaagccagccgctgaagttcactctgagtggggtagatggagactcctggtcctcaggggaagattagaaactgcccctctggcactgaggacttagtggggggtggggggaatgtccctccctgctctgggccagcactcttagctttgataacttgacctgtggtatctctcgtggagaggtgtggctggctgagacaggtgagatcctgcctggatcaccctgaaggctcaggtcagctgagcctatagttcaacgccccctttcttctgtggctcacctgctggaagaggcttgggcccagagctttcccacgagactgctctggccagagcttgctagccctgcctgtctacagtagcaccacctgcacagggtctggtgcatgcccagaggagcagcaatgatgagtgactctcatcatctcagcctgctgagatcttgtttctctcttcctcccttgaataaagctgtatccctacctacaa

SEQ ID NO: 92 - DNA, 8657 bp, Pan troglodytes
  variation 8462: note = n is a, c, g, or t
  variation 8476: note = n is a, c, g, or t
  source 1..8657: mol_type = genomic DNA
tcccactcccgactctcagtcgctcaggctactcccaccccgccccgccccgtcattgtccccgtcggtctcttttctcttccgtcctaaaagctctgcgagccgctcccttctcccggtgccccgcgtctgtccatcctcagtgggtcagacgagcaggatggagggctgcatgggggaggagtcgtttcagatgtgggagctcaatcggcgcctggaggcctacctggcccgggtcaaggcgctggaggagcagaatgagctgctcagcgcggagctcggggggctccgggcacaatccgcggacacctcctggcgggcgcgtgccgacgacgagctggcggccctgcgggccctcgttgaccaacgctggcgggagaagcacgcggccgaggtggcgcgcgacaacctggctgaagagctggagggcgtggcaggccgatgccagcagctgcggctggtccgggagcggacgacggaggaggtagcccgcaaccggcgcgccgtcgaggcagagaaatgcgcccgggcctggctgagtagccaggcggcagagctggagcgcgagctagaggctctacgcgtggcgcacgaggaggagcgcgtcggcctgaacgcgcaggctgcctgtgccccccgctgcccagcgccgccccgcgggcctcccgcgccggccccggaggtggaggagctggcaaggcgactgggcgaggcgtggcgcggggcagtgcgcggctaccaggagcgcgtggcacacatggagacgtcgctgggccaggcccgcgagcggctgggccgggcggtgcagggtgcccgcgagggccgcctggagctgcagcagctccaggctgagcgcggaggcctccaggagcgcagggcagcgttggaacagaggttggaggaccgctggcaggagcggctgcgggctactgaaaagttccaggtgaggaggttgagggcctgggtgagagaaagtcccagaacgctccagaaagtcccttatgaagctcagagaccttctgggaagggagtggggctagctggctgctgaatcaggagccagttctcagaaacctggtgccacacgtcctagacttttacagcccgtctagtgtaggatgcgaatggtggggcttctcgaagcacatcccgggtgggcagtcaggcccaagacccgttgcagcagccccgccactctctggatggcaccttctggctctgatgatgactggggctccgggccccttcccaggctctggtattactaggaggacacccagcactgtcgcctctgcgctgaatctggtggcctggccactcagaatcaccaagttcctcacagccctcctccccctgaggggaggagtgaggggccgtgaatgaatggctaccagccccctcccatgccatggcttctcggctccctggagcacattccagaggcccataacagctgctccttctcacagggcacagatgtgaccagcagctgagaaaacagcttcttgcctgggccacacagaggtgccatggccacctccccatccctcctctcagaggagagagaatccagaacatgtgggaagtgggggtggggcgggggtgagagcctgctgtgaggagcaggagacagctgtgggagatgggaccaatgggggacaggggctgtttgccttccagtcctgcaggctccagccatcttgattaatcgtttttccttctgcttttgcttttttttcccctcttctctctccataacccatctcgtctcctccctcacctccccttcctgtgggagctgtgttctgagcaacatgtgctaccatttaatcagcatcctcagaggaggagcaggccatgggagagagctgagagggctgacaggggccctgggctcatcttggctgatccagagggggctctctgggcagggaatagggtaggggaggcgggggtctgctacacagataagtcagccagggagcaggaggtgcttcccgggcagcggcagcgggcaggatgcaggttggttcacagaagggaccccagcccctccactgactgcctctcgcctgccctgcagctggctgtggaggccctggagcaggagaaacagggcctacagagccagatcgctcaggtcctggaaggtcggcagcagctggcgcacctcaagatgtccctcagcctggaggtggccacgtacaggtacgagacgagccctgtccacccaggcacgcagaggcacacacacatgctggggcagactacgtggctgaaggggaccagaggtgtaggtgatggcaactctgctgccactgggttctgtgactctaggctggtcacttccacaccggaacatgtcctgcctgaaaccatctgctcccccataggctggagacctgagaaatgtcctgtgcccgggaaatccccccaggagagatgatattgccgagcgggacagcctctggagaggggctgggcccgtgtggggcaactgcatccagacccttcccccaaggggcaaagctccaactctatgtgtgcccacacccagggggtcatgtcctttggcagccacggaaaggaggcattgcaggcatggggtggctgcactgacttgccacctgacctgggcctcagcctcgtctaggggctgagggctgggctgggggacttccaaggcctcttctagcctggatgtcatggggccagactcctctgatgcccctagtgcccttggtcctgcccagcccttcattgtccacattttctgttatcctagaaatggctgagaccaaggaggggtggcttctcacttgctatgtggccttgggcaaagcccgcagtctcttctgggaaactggtcctgttggctgaggggccattgatggggcctgaggaaggggctctgtggctggtgaggggccacatgagatccaggaaaggaggggaggcaaggcccagagatggaaggtcagtgaggctctggggaggacgtggaggagaggggctccaccgccagggaagagaagcccagaaggaaggccgcagcactggcaaggacagaggtgaggctacagcgagtgctaaccagactcagagatcatggagcaaagcagagaggagcagctgctcatcctaagttattgaattgattggtccctgctcccctctttggttcaaggggcgctgaggaaggggcctggacacaaagacctctgtgccccgaagagcttgggatccagagtgcttagagatcctgagatgagggccctgacccccagtgaagccaccgaggggaagggtctggtgggccccgaggaatttaactgctattttttgaggcatgaaaaggatttggagagggggagctgaattcatttgcttttgtctgtcgctagctctgggggccaccggggaaggaggagggagcccatcccatgggaacggcctgagaattcccacttccccagaatcctctccttctcagaccctccagatggtggcttggacaatggcagcaattagcatgagaatcggtcccccacacagaggatgaggtcattggcctggggtgggaggaggaggctagcctaagccttgtgtgggtgtgtgtagggcaatgtccgactgtgtgggaatctgcttctatgtctgcgctctgctgtgtatcccaaatacagtgtgactttgtgtgaccaagtgtgtgatgtctgtgggtatgtgactgtgtgatttcaccctgagtgtggcttttgtgtgacagtgtcaaatgaagaggaagcctgcagggcctggatggtgcaagctcagcctgagttgtccccagctggcttgctgcctgcaggcctgggggcagagggctgaccccactttccctctgtcctctccaggaccctcctggaggctgagaactcccggctgcaaacacctggcggtggctccaagacttccctcagctttcagggtaagaggaggggccaagttcccccagaaactaccctgctttgctcttcatacccagacctatctttcccgagaggcaccaatctaaatttcaagtccgtggcctccagtgtcagtgagcatgctctcagcccagccatgggcgccaggggcaggcgcatggatactcttgccagcggtggctgctctgtggctcccctcattgccagtgatatactgatgctgtttcttccccctctgcctttccagaccccaagctggagttgcaattccctgggaccccagagggccggcgtcttggatctctgctcccagtcctgagcccaacttccctcccctcacccttgcctgctacccttgagacacctgtgccagcctttcttaagaaccaagaattcctccaggcccgtacccctaccttggccagcacccccatcccccccacacctcaggcaccctctcctgctgcagatgcagagatcagagcccaggatgctcctctctctctgctccagacacagggtgggaggaaacaggctccagagcccctgcgggctgaagccagggtggccattcctgccagcgtcctgcctggaccagaggagcctgggggccagcggcaagaggccagtacaggccagtccccagaggaccatgcctccttggccccacccctcagccctgaccactccagtttagaggctaaggatggagaatccggtgggtctagagtgttcagcatatgccaaggggaaggtgaagggcaaatctgggggttggtagagaaagaaacagccatagagggcaaagtggtaagcagcttgcagcaggaaatatgggaagaagaggatgtaaacaggaaggaaatccaggactcccaggttcctttggaaaaagaaaccctgaagtctctgggagaggagattcaagagtcgctgaagactctggaaaaccagagccatgagacactagaaagggagaatcaagaatgtccgaggtctttagaagaagacttagaaacactaaaaagtctagaaaaggaaaataaagagctattaaaggatgtggaggtagtgagacctctagaaaaagaggctgtaggccaacttaagcctacaggaaaagaggacacacagacattgcaatccctgcaaaaggagaatcaagaactaatgaaatctcttgaaggtaatctagagacatttttatttccaggaaaggaaaatcaagaattagtaagttctctgcaagagaacttagagtcattgacagctctggaaaaggagaatcaagagccactgagatctccagaagtaggggatgaggaggcactgagacctctgacaaaggagaatcaggaacccctgaggtctcttgaagatgagaacaaagaggcctttagatctctagaaaaagagaaccaggagccactgaagactctagaagaagaggaccagagtattgtgagacctctagaaacagagaatcacaaatcactgaggtctttagaacaacaggaccaagagacattgagaactcttgaaaaagagactcaacagcgacggaggtctctaggggaagaggatcagatgacattaagacccccagaaaaagtggatccagaaccactgaagtctcttgaccaggagatagctagacctcttgaaaatgagaatcaagagttcttaaagtcactcaaagaagagagtgtagaggcagtaaaatctttagaaacagagatcctagaatcactgaagtctgcaggacaagagaacctggaaacactgaaatctccagaaactcaagcaccactgtggactccagaagaaataaatcaggggacaatgaaacctctagaaaaggaaattcaagaaccactggagtctgtggaagtgaaccaagagacattgagactcctggaagaggagaatcaggaatcattgagatctctgggagcatggaacctggagaatttgagatctccagaggaggtagacaaggaaagtcaaaggaatctggaagaggaagagaacctgggaaagggagagtaccacgagtcactgaggtctgtggaggaggagggacaggagctgctgcagtctgcagatgtgcagaggtgggaagatacggtggagtaggaccaagaactggctctggaaagccctcctgggatggctggagtggaaaatgaggatgaggcagagctgaatctgagggagcaggatggcttcactgggatggaggaggtggtagagcagggagagctgaatgccacagaggaggtctggatcccaggcgaggggcacccagagagccctgagcccaaagagcagagaggcctggttgagggagccagtgtgaagggaggggctgagggcctccaggaccctgaagggcaatcacaacaggtggtggccccaggcctccaggctccccaggggctgccagaggcgatagagcccctggtggaagatgatgtggccccagggggtgaccaagcctccccagaggtcatgttggggtcagagcctgccatgggtgagtctgctgcgggagctgagccaggcccggggcagggggtgggagggctggaggacccaggccatctgaccagggaagaggtgatggaaccacccctggaagaggagagtttggaggcaaagagggttcagggcttggaagggcctagaaaggacctagaggaggcaggtggtctggggacagagttctccgagctgcctgggaagagcagagacccttgggagcctcccaagggtagggaggagtcagaggctgaggcccccaggggagcagaggaggcgttccctgctgagaccctgggccacactggaagtgatgccccttcaccttggcctctggggtcagaggaagctgaggaggatgtaccaccagtgctggtctcccccagcccaacgtacaccccgatcctggaagatgcccctgggcctcagcctcaggctgaagggagtcaggaggctagctggggggtgcaggggagggctgaagccctggggaaagtagagagcgagcaggaggagttgggttctggggagatccccgagggcctccaggaggaaggggaggagagcagagaagagagcgaggaggatgagctcggggagacccttccagactccactcccctgggcttctacctcaggtcccccacctcccccaggtgggaccccactggagagcagaggccaccccctcaaggggagactggaaaggagggctgggatcctgctgtcctggcttccgagggccttgaggccccaccctcagaaaaggaggagggggaggagggagaagaggagtgtggctgtgactctgacctgtcagaagaatttgaggacctggggactgaggcaccttttcttcctggggtccctggggaggtggcagaacctctgggccaggtgccccagctgctactggatcctgcagcctgggatcgagatggggagtccgatgggtttgcagatgaggaagaaagtggggaggagggagaggaggatcaggaggaggggagggagccaggggctgggcggtgggggccagggtcttctgttggcagcctccaggccctgagtagctcccagagaggggaattcctggagtctgattctgtgagtgtcagtgtcccctgggatgacagcttgaggggtgcagtggctggtgcccccaagactgccctggaaacggagtcccaggacagtgctgagccttctggctcagaggaagagtctgaccctgtttccttggagagggaggacaaagtccctggccctctagagatccccagtgggatggaggatgcaggcccaggggcagacatcattggtgttaatggccagggtcccaacttggaggggaagtcacagcatgtgaatgggggagtgatgaacgggctggagcagtctgaggaagtggggcaaggaatgccgctggtctctgagggagaccgagggagcccctttcaggaggaggaggggagtgccctgaagacctcttgggcaggggctcctgttcacctgggccagggtcagttcctgaagttcactcagagggaaggagatagagagtcctggtcctcaggggaggactaggaaaagaccatctgcccggcactggggacttaggggtgcggggaggggaaggatgcctccaagcccgctccctgctcaggagcagcactcttaacttacaatctcttgacatacggtttctggctgagaggcctggcccgctaaggtgaaaaggggtgtggcaaaggagcctactccaagaatggaggctgtaggaatataacctcccgccctgcaaagggaatctcttgcctgctccatctcataggctaagtccgctgaatcccgatagtactaggtccccttccctccgaatcccctcagctggaaaaggcctgtggcccagaggcttctccaagggagggtgacatgctggcttttgtngcccagctcaccanccctgcgccacctcactgcagtagcgcaccatctcactgcagtagcacgccctcctgggccgtctggcctgtggctaatggaggtgacggcactcccatgtcctgactccccccatccctgccacgctgtggccctgcctggctagtccctgcctgaataaagtaatgcctctgcttcaaa

SEQ ID NO: 93 - DNA, 1940 bp, Homo sapiens
  source 1..1940: mol_type = genomic DNA
agggggcggggaggggcgcagggctgcgcgctcgccggcgctctctttcggtttggtcggcggctggaggagagtggacccccccactttaaggctctgtcctcggcgcgttcccgccgccccccggtcccgacgcggggctcggggatgcccgccagcatgttcagcatcgacaacatcctagccgcccggccgcgctgcaaggactcggtgttgccggtggcgcacagcgcggcggctcccgtcgtcttcccggccctgcacggggactcgctctacggcgccagcggcggcgcctcctcggactatggcgccttctacccgcgccccgtggcccccggcggcgcgggcctcccggccgcggtcagcggctcccgcctcggctacaacaactacttctacgggcagctgcacgtgcaggcggcgcccgtgggcccggcctgctgcggggccgtgccgccgctgggcgcccagcagtgctcctgcgtcccgacgcccccaggtagggtcgcgctcgctccggcctctgccgcccactgcggtccttagcccatggagccggttggttaattcaccttcctcaaactttgctcctcttgcaactcccccctccgcttttgccgatcgggcgcaggagtttgcaaacttcttgctgcaaacttttggccagagttcgcgaaaactggaattcagtgcctgcccggggaaactgggttttgttttgttttgttttgttttgaattctcttactggctttggcgggtgtgcggatggatgctctaacacgcctcctccttttccctgcacccctgattcccgtgcacccccaattctcagcatccccttgcagacgacttctaagtggaagagggtcgggggctggcgggcgtgcatgcgtgcggtggcgagggcgggcggctgaccgtgcgccccactctgtcgcaggctacgagggccccggttcggtgctggtgtccccggtaccgcaccagatgctgccctacatgaacgtgggcacgctgtcgcgcaccgagctgcagcttctcaaccagctgcactgtcggcggaagcggcggcaccgcaccatcttcactgacgagcagctcgaagctctcgagaacctcttccaggagaccaagtacccggacgtgggcacgcgcgagcagctggcccggaaagtgcacctccgcgaggagaaagtggaggtaggcgccggggcctgccgtgggcgcctagcggtccttccccgcgaggtggggccccagtcgggtttgcccagccctgcttggctctccccgcactttaaaaacatcccgatggcggcccgcaggctgctggagggcgctttaggcccaggaagttgaatgaaaacgcggaagcgggagcgagcggctcccctccttttgttggcctgcgcggggtgtcccgccgccacaccaagctccccgggtgccccgggactgggggaagcgcgcctttgatctgaactgttttgtcctccgttgcgcaacaggtctggtttaagaaccgccgcgccaaatggaggcggcagaagcggtcctcatcagaggagtcggagaacgcggagaagtggaacaagacgtcgtcgtcgaaggcgtcaccggagaagagggaagaggaaggtaaaagcgatttggactcggacagctgacggccgcgggacacttgcccgtattacttacctaactcgaaggacttgcacagacagacgatgctactttcttgcacacgcgctgccttgcgggagggggtcgagaaagaggaacgaggagctgtaaatagtgtacagagccgggagggtcggcgtctggggtcagggcgcgcacagcccagcagcccgaggccgcccgcgactagcccccaccgtagtatttatagttaaattaagggtgacagtacaataaagtgatggcgatgta

SEQ ID NO: 94 - DNA, 2028 bp, Mus musculus
  source 1..2028: mol_type = genomic DNA; note = Mus musculus strain C57BL/6J
ctcgcccgcgggagcagagagtgggacaattcccaacccccaccccaaacaacaccacttggagacttcttcttcttcggcgcgtccccgccgccccccggtcccgacgcggggctcggggatgcccgccagcatgttcagcatcgacaacatcctggccgcccggccgcgctgcaaagacgcggtgctcccggtggcgcccagcgccgcggctccggtggtcttcccggctctacacggggactcgctctacggcgccggcggcggcacctcctcggactacggcgccttctacccgcgccctgtggcccccggaggcgcgggcctcccggccgcggtcggcagctcccgcctgggctacaacagctacttctacgggcagctgcacgtgcaggcggcgcccgtgggcccggcttgctgcggggctgtgccgccgctgggcgcccagcagtgctcctgcgtcccgacgcccccaggtagggtcgcgatcgctcgcgagccggccttcgccactgcggcagtcggtggctgccggggcatggacgcgcggtttgcttgctttactcacctggcaccaactttctccctttgcaagccttccccgttctcccatttatttatttatcttttacttttaattaattaatatatttttgggtcaccgggtacggggactttgcatacgtctactgtaaactttaggttagagtttaaaaagccgagtcaccgggagtctcggggcgactccacgcgcgcgcgggaatgaagtgaggacgcggggagattctaaagtgcctgaactggcttttggatgtgtgcaggcagacgctccttccacgtctgggcatccctggtctcggtgccccccaaagacatagcgccccttgcagactttttttatttttaagtgagcgagggcagcgagcgggttggcttacggtgccgagggaggatgactgactcccgtccctctctctgtcgcaggctacgagggccccggttctgtactggtgtctccggtgccgcaccagatgctgccctacatgaacgtgggcacgctgtcgcgcactgagctgcagctgctcaaccagctgcactgtcggcggaagcggcggcaccgcaccatcttcaccgatgagcagctcgaagccctggagaacctcttccaggagacgaagtacccagacgtgggcactcgggagcagctggccaggaaggtgcaccttcgggaggagaaggtggaggtaggcaagagccccagcgggggtgggctggggtgggggcgtctagcggtccttccctgcacgcggcttttgccgggtcctcctttgggatgtggccactctaagagcatcccagaggctgtggcctggaggctgcccgagggtactttaggcccaagaaggaaaagaggaagcgtggagggtgcttctccttttgttggtcttgagcacagcgattgcctgcggatttctccctgccaggctaaggttccacggtcaggctgtcccctggccacgcggggccacccggtgccctggtgtcggtgggcagcagcctttaggtcaccactgtttggttgcgcaacaggtctggtttaagaaccgccgagccaagtggagacgacagaagcgatcctcctcggaggagtcagaaaacgccgagaagtggaacaagacgtcctcaaaagcctcgccggagaagagggaagaggaaggtaaaagcgatttggactcggacagctgacggccgcggccgcgggccggccggggcgcttgcctgacgcaaggacttgcacagacagtcgatgctacttgcacacaccctgccttgcgggagggggtcgagaaagcaacgaggagctagctgtaaataatgtacaggcccaggactgctggggacaggcgcgtggggaccgcagccccactgtcccgggctgcctgcgtgagcctcgtcccccaccgtagtatttatagttaagttaacggtgacaatacaataaagtgatggcaatgtagaccagccatg

SEQ ID NO: 95 - DNA, 1523 bp, Pan troglodytes
  source 1..1523: mol_type = genomic DNA
atgcccgccagcatgttcagcatcgacaacatcctagccgcccggccgcgctgcaaggactcggtgctgccggtggcgcccagcgcggcggctcccgtcgtcttcccggccctgcacggggactcgctctacggcgccagcggcggcgcctcctcggactatggcgccttctacccgcgccccgtggcccccggcggcgcgggcctcccggccgcggtcagcggctcccgcctcggctacaacaactacttctacgggcagctgcacgtgcaggcggcgcccgtgggcccggcctgctgcggggccgtgccgccgctgggcgcccagcagtgctcctgcgtcccgacgcccccaggtagggtcgcgctcgctccggcctctgccgcccactgcggtccttagcccatggagccggttggttaattcaccttcctcaaactttgctcctcttgcaagtcccccctccgcttttgccgatcgggcgcaggagtttgcaaacttcttgctgcaaacttttggccagagttcgcgaaaactggaattcagtgcctgcccggggagactgggttttgttttgttttgttttgtttttaattctcttactggctttggcgggtgtgcggatggatgcgctaacgcctcctccttttccctgcacccctgattcccgtgcacccccaattctcagcatccccttgcagacgacttctaagtggaagagggtcgggggctggcgggcgtgcatgcgtgcggtggcgagggcgggcggctgaccgtgcgccccactctgtcgcaggctacgagggccccggctcggtgctggtgtccccggtaccgcaccagatgctgccctacatgaacgtgggcacgctgtcgcgcaccgagctgcagcttctcaaccagctgcactgtcggcggaagcggcggcaccgcaccatcttcactgacgagcagctcgaagctctcgagaacctcttccaggagaccaagtacccggacgtgggcacgcgcgagcagctggcccggaaagtgcacctccgcgaggagaaagtggaggtaggcgccggggcctgccgtgggcgcctagcggtccttccccgcgaggtggggccccagtcgggtttgcccagccctgcttggctctccccgcactttaaaaacatcccgatggcggcccgcaggctgctggagggcgctttaggcccaggaagttgaatgaaaacgcggaagcgggagcgagcggctcccctccttttgttggcctgcgcggggtgtcccgccgccacaccaagctccccgggtgtcccgggactggggaaagcgcgcctttgatctgaactgttttgtcctccgttgcgcaacaggtctggtttaagaaccgccgcgccaaatggaggcggcagaagcggtcctcatcagaggagtcggagaacgcggagaagtggaacaagacgtcgtcgtcgaaggcgtcaccggagaagagggaagaggaaggtaaaagcgatttggactcggacagctga

SEQ ID NO: 96 - DNA, 20 bp, synthetic construct
  misc_feature 1..20: note = Primer
  source 1..20: mol_type = other DNA
gggagcttgtgttcctcatc

SEQ ID NO: 97 - DNA, 20 bp, synthetic construct
  misc_feature 1..20: note = Primer
  source 1..20: mol_type = other DNA
ctaccaggcgagagtgttcc

SEQ ID NO: 98 - DNA, 20 bp, synthetic construct
  misc_feature 1..20: note = Primer
  source 1..20: mol_type = other DNA
ccagctctttgcctctctgt

SEQ ID NO: 99 - DNA, 20 bp, synthetic construct
  misc_feature 1..20: note = Primer
  source 1..20: mol_type = other DNA
tgcctctggctcctgtagtt

SEQ ID NO: 100 - DNA, 20 bp, synthetic construct
  misc_feature 1..20: note = Primer
  source 1..20: mol_type = other DNA
tcagcctgcatcaccagaga

SEQ ID NO: 101 - DNA, 21 bp, synthetic construct
  misc_feature 1..21: note = Primer
  source 1..21: mol_type = other DNA
ctgcaaggacaggatgctgat

SEQ ID NO: 102 - DNA, 19 bp, synthetic construct
  misc_feature 1..19: note = Primer
  source 1..19: mol_type = other DNA
ggatgcacaagcaggtgac

SEQ ID NO: 103 - DNA, 19 bp, synthetic construct
  misc_feature 1..19: note = Primer
  source 1..19: mol_type = other DNA
cactggtttagctccagcg

SEQ ID NO: 104 - DNA, 20 bp, synthetic construct
  misc_feature 1..20: note = Primer
  source 1..20: mol_type = other DNA
cggaaggctccaacatagaa

SEQ ID NO: 105 - DNA, 22 bp, synthetic construct
  misc_feature 1..22: note = Primer
  source 1..22: mol_type = other DNA
tcaaattcagggtcatcaacaa

SEQ ID NO: 106 - DNA, 20 bp, synthetic construct
  misc_feature 1..20: note = Primer
  source 1..20: mol_type = other DNA
aacaaaggcaccatcctcaa

SEQ ID NO: 107 - DNA, 20 bp, synthetic construct
  misc_feature 1..20: note = Primer
  source 1..20: mol_type = other DNA
cagctcggccatattcacac

SEQ ID NO: 108 - DNA, 21 bp, synthetic construct
  misc_feature 1..21: note = Primer
  source 1..21: mol_type = other DNA
aacaccaacaaccacaactcc

SEQ ID NO: 109 - DNA, 20 bp, synthetic construct
  misc_feature 1..20: note = Primer
  source 1..20: mol_type = other DNA
cagcttttcctctgctgctt

SEQ ID NO: 110 - DNA, 21 bp, synthetic construct
  misc_feature 1..21: note = Primer
  source 1..21: mol_type = other DNA
tggtgtcaagcctactccttt

SEQ ID NO: 111 - DNA, 21 bp, synthetic construct
  misc_feature 1..21: note = Primer
  source 1..21: mol_type = other DNA
caggggaagtgttctgtctgt

SEQ ID NO: 112 - DNA, 20 bp, synthetic construct
  misc_feature 1..20: note = Primer
  source 1..20: mol_type = other DNA
ccaacgtgtgattgtggtgt

SEQ ID NO: 113 - DNA, 20 bp, synthetic construct
  misc_feature 1..20: note = Primer
  source 1..20: mol_type = other DNA
tcttccgatgttgtctggtg

SEQ ID NO: 114 - DNA, 20 bp, synthetic construct
  misc_feature 1..20: note = Primer
  source 1..20: mol_type = other DNA
tgaggaatggtcgttgcttt

SEQ ID NO: 115 - DNA, 20 bp, synthetic construct
  misc_feature 1..20: note = Primer
  source 1..20: mol_type = other DNA
tctcatggggcttttgtctc

SEQ ID NO: 116 - DNA, 21 bp, synthetic construct
  misc_feature 1..21: note = Primer
  source 1..21: mol_type = other DNA
aactaaaggccccattgctac

SEQ ID NO: 117 - DNA, 19 bp, synthetic construct
  misc_feature 1..19: note = Primer
  source 1..19: mol_type = other DNA
caatccccatcgtctaccc

SEQ ID NO: 118 - DNA, 21 bp, synthetic construct
  misc_feature 1..21: note = Primer
  source 1..21: mol_type = other DNA
cccttgttcctctgcctactc

SEQ ID NO: 119 - DNA, 20 bp, synthetic construct
  misc_feature 1..20: note = Primer
  source 1..20: mol_type = other DNA
tcatgggtgtctctgtccaa

SEQ ID NO: 120 - DNA, 20 bp, synthetic construct
  misc_feature 1..20: note = Primer
  source 1..20: mol_type = other DNA
cgcggttctattttgttggt

SEQ ID NO: 121 - DNA, 21 bp, synthetic construct
  misc_feature 1..21: note = Primer
  source 1..21: mol_type = other DNA
aacctccgactttcgttcttg

SEQ ID NO: 122 - DNA, 20 bp, synthetic construct
  misc_feature 1..20: note = Primer
  source 1..20: mol_type = other DNA
agttggcgtggagactttgc

SEQ ID NO: 123 - DNA, 18 bp, synthetic construct
  misc_feature 1..18: note = Primer
  source 1..18: mol_type = other DNA
cagggcttcatgtcctgg

SEQ ID NO: 124 - DNA, 21 bp, synthetic construct
  misc_feature 1..21: note = Primer
  source 1..21: mol_type = other DNA
tcttcctggtccccacagttt

SEQ ID NO: 125 - DNA, 25 bp, synthetic construct
  misc_feature 1..25: note = Primer
  source 1..25: mol_type = other DNA
gcaagaatagttctctcgggatgaa

SEQ ID NO: 126 - DNA, 21 bp, synthetic construct
  misc_feature 1..21: note = Primer
  source 1..21: mol_type = other DNA
ccctcgacagactgaccctaa

SEQ ID NO: 127 - DNA, 22 bp, synthetic construct
  misc_feature 1..22: note = Primer
  source 1..22: mol_type = other DNA
tcggggctaatctcactttcat

SEQ ID NO: 128 - DNA, 21 bp, synthetic construct
  misc_feature 1..21: note = Primer
  source 1..21: mol_type = other DNA
cccctgaacggtgatactgat

SEQ ID NO: 129 - DNA, 21 bp, synthetic construct
  misc_feature 1..21: note = Primer
  source 1..21: mol_type = other DNA
aagtcctgctttacgccattc

SEQ ID NO: 130 - DNA, 21 bp, synthetic construct
  misc_feature 1..21: note = Primer
  source 1..21: mol_type = other DNA
aaaatggaaacggggtgactt

SEQ ID NO: 131 - DNA, 22 bp, synthetic construct
  misc_feature 1..22: note = Primer
  source 1..22: mol_type = other DNA
ggctgcatacattgggttttca

SEQ ID NO: 132 - DNA, 21 bp, synthetic construct
  misc_feature 1..21: note = Primer
  source 1..21: mol_type = other DNA
tgtgtctcaggggattgtagg

SEQ ID NO: 133 - DNA, 23 bp, synthetic construct
  misc_feature 1..23: note = Primer
  source 1..23: mol_type = other DNA
agctgttttcttggaatctctcc

SEQ ID NO: 134 - DNA, 23 bp, synthetic construct
  misc_feature 1..23: note = Primer
  source 1..23: mol_type = other DNA
catgttccagtatgactccactc

SEQ ID NO: 135 - DNA, 20 bp, synthetic construct
  misc_feature 1..20: note = Primer
  source 1..20: mol_type = other DNA
ggcctcaccccatttgatgt

SEQ ID NO: 136 - protein, 6 aa, Homo sapiens
TAATKK
